(19) United States
(12) Patent Application Publication
(10) Pub. No.: US 2025/0161374 A1
(43) Pub. Date: May 22, 2025

(54) BACILLUS COAGULANS STRAIN, COMPOSITIONS THEREOF, AND METHODS OF USE

(71) Applicant: DEERLAND PROBIOTICS & ENZYMES, INC., Kennesaw, GA (US)

(72) Inventor: John DEATON, Kennesaw, GA (US)

(73) Assignee: DEERLAND PROBIOTICS & ENZYMES, INC., Kennesaw, GA (US)

(21) Appl. No.: 18/712,764

(22) PCT Filed: Dec. 8, 2022
(86) PCT No.: PCT/US2022/081195

§ 371 Date: May 23, 2024

(30) Foreign Application Priority Data
Dec. 8, 2021 (IE) 2021/0210

(51) Int. Cl. A61K 35/742

(52) U.S. Cl. CPC A61K 35/742

(57) ABSTRACT

The invention is directed to new Bacillus coagulans strain, which alone or in combination with other Bacilli strains can be used as probiotics or together with a prebiotic and a symbiotic. The invention also relates to a composition such as a pharmaceutical composition, dairy product, functional food, nutraceutical, dietary supplement, and product for personal care comprising the new Bacillus coagulans strain alone or in combination with other strains, as well as use of the strain for prevention or treatment gastrointestinal infections and diseases, and other uses.

### FIELD OF THE INVENTION

[0001] This invention relates to a new Bacillus coagulans strain, which alone or in combination with other Bacilli strains can be used as probiotics or together with a prebiotic and a symbiotic. The invention also relates to a composition such as a pharmaceutical composition, dairy product, functional food, nutraceutical, dietary supplement, and product for personal care comprising the new Bacillus coagulans strain alone or in combination with other strains, as well as use of the strain for prevention or treatment gastrointestinal infections and diseases, and other uses.

### BACKGROUND OF THE INVENTION

[0002] Probiotics are live microorganisms or microbial mixtures administered to improve the patient's microbial balance, particularly the environment of the respiratory and gastrointestinal tract. Bacillus strains have been employed for the treatment of respiratory infections, prevention of diarrhoea, as well as, for the treatment of immuno-related diseases (Elshaghabee et al., 2017).

[0003] The normal intestinal flora is dominated by various bacterial species, which produce substances that help control the growth of pathogens. Dysbiosis is a condition that is characterized by a decrease of the certain bacterial species and an increased growth of pathogenic bacteria. Dysbiosis has been associated with the development of periodontal disease, inflammatory bowel disease, and chronic fatigue syndrome. Some studies have suggested patients with dysbiosis may have an increased risk of developing metabolic and cardiac disorders (Chan et al., 2013).

[0004] By administering probiotic Bacilli, it is possible to regenerate the intestinal flora of men and women with recurrent episodes of dysbiosis. Dysbiosis is a common gastrointestinal problem. Dysbiosis caused by Escherichia coli is also a common problem (Chan et al., 2013).

[0005] The presence of Bacilli is important for the maintenance of the intestinal microbial ecosystem. Bacilli have been shown to possess inhibitory activity toward the growth of pathogenic bacteria such as Listeria monocytogenes, Escherichia coli, Salmonella spp. and others (Yilmaz et al., 2005). This inhibition could be due to the production of inhibitory compounds such as organic acids, hydrogen peroxide, bacteriocins or reuterin or to competitive adhesion to the epithelium (Abriouel et al., 2010).

[0006] Bacilli have also been examined as a treatment of respiratory tract infections (Marseglia et al., 2007). For example, the installation of Bacilli, and stimulation of indigenous organisms has been employed to prevent recurrence of urinary tract infections (Marseglia et al., 2007). The role of Bacilli in preventing intestinal infections has also been investigated.

### DESCRIPTION OF RELATED ART

[0007] The importance of Bacilli as probiotics has been described in the literature.

[0008] Hyronimus et al., 2000 discloses the screening of probiotic activities of a number of Bacilli strains by in vitro techniques and evaluation of the colonization ability of thirteen selected strains in humans. The strains were examined for resistance to pH 2.5 and 0.3% Oxgall adhesion to Caco-2 cells and antimicrobial activities against enteric pathogenic bacteria (Khochamit et al., 2015). Bacilli have been shown to possess the primary requirement of GIT stress tolerance, besides having good adhesion and bio-therapeutic properties (Thakur et al., 2016).

[0009] Pharmaceutical compositions of Bacilli known in the art are not sufficiently efficient in recolonizing in vivo i.e., mammalian microbial ecosystems and there is, therefore, a need to find Bacilli with an inherent ability to recolonize upon administering the Bacilli in the form of a pharmaceutical composition, a nutraceutical, a dairy product, a functional food or absorbent product. Bacilli isolated from soil, may have the ability to recolonize in vivo upon administration because of their inherent ability to survive in the human microbial ecosystem. It is often a cumbersome process to identify Bacilli strains with enhanced abilities to colonize upon administration and it is therefore important to select the best test systems to predict their in vivo ability to colonize.

[0010] In the literature, there seems to be a large variation in the reported in vitro adherence of probiotic strains. This variation indeed reflects biological differences between strains, but certainly also depends on experimental conditions. Moreover, there also seems to be variation with regard to how to measure the adherence. It may be argued that an in vitro experiment only serves as a means to estimate the in vivo ability to colonize by adherence to epithelial cells.

[0011] Despite being long considered soil microorganisms, Bacillus spp. have been used for more than 50 years in the form of fermentation products or spore-based supplements (Cutting et al., 2011). Bacilli, being ubiquitous in nature, consistently enter the gastrointestinal and respiratory tracts of healthy people through food, water, and air (Benno & Mitsuoka, 1986). They have been isolated from the gut and can reach up to 10⁷ CFU/g and hence are considered to be one of the dominant components of the normal gut microbiota (Lakshmi et al., 2017). More recently, strains of Bacillus clausii have been isolated in order to provide more specific functions and its safety has been evaluated. Bacillus clausii has been previously used in diarrhoeal patients (Sudha et al., 2013, Horosheva et al., 2014) and children with recurrent respiratory infections (Marseglia et al., 2007) with no adverse events reported. Though the countries and strains are not specified, Bacillus clausii has been commercialized in 55 countries around the world (Nista et al. 2004; Gabrielli et al. 2009). The literature review for Bacillus clausii showed no adverse events related to the probiotic and the worldwide presence of bacteria in different countries supplements the narrative of its safety for human consumption.

[0012] Bacillus coagulans has a long history of use in a variety of foods. There have been many strains of Bacillus coagulans that have been widely consumed around the world for decades (Endres et al., 2009). The presence of this bacterium can be found in foods such as yogurts, milk, sauerkraut, kimchi, and other dairy products, all of which contain levels of Bacillus coagulans from 5×10⁹ CFU/g (Sudha et al., 2016) to 9.38×10¹⁰ (Endres et al., 2011). Several Bacillus species have been reported to be common in honeys and include Bacillus megaterium, Bacillus coagulans, Bacillus subtilis, Bacillus licheniformis, and Bacillus pumilus (Alippi, 1995; Alippi et al., 2004; Gilliam, 1979; Gilliam & Valentine, 1976; Snowdon & Cliver, 1996). The origin of this bacterial species for use in probiotics stems from India, where a number of manufacturers produce Bacillus coagulans as a food ingredient for export and relabeling in Europe and the US (Cutting, 2011). In order to assess the safety of Bacillus coagulans, the genome was investigated and it was found that it did not contain any deleterious genes (Salvetti et al., 2016). Due to the nonhazardous nature of Bacillus coagulans, this bacterium has been reported safe by the US Food and Drug Administration (FDA) and the European Union Food Safety Authority (EFSA) and is on the Generally Recognized as Safe (GRAS) and Qualified Presumption of Safety (QPS) list (European Food Safety Authority, 2017). Some of the non-pathogenic strains among the 100 known Bacillus spp., including Bacillus coagulans and Bacillus subtilis, were stated as safe for human consumption for all ages (Nithya & Halami, 2012). A literature review for Bacillus coagulans shows no adverse events related to the probiotic which solidifies the findings that is well tolerated and safe. Therefore, Bacillus coagulans may be considered a probiotic of safe and consumption providing benefit to the host.

[0013] Bacillus megaterium has been found on diverse habitats from soil to seawater, sediment, rice paddies, honey, fish, milk and dried foods (Alfoldi, 1957; Alippi & Reynaldi, 2006; Padgham and Sikora, 2007; Pelletier & Sygusch, 1990; Vary et al., 2007; Von Tersch and Carlton, 1983; Scholle et al., 2003, Kotb, 2014). Further qualitative analysis of microorganisms isolated from honeys revealed that one of the most frequent species of Bacillus is Bacillus megaterium (Alippi, 1995; Alippi et al., 2004; Snowdon & Cliver, 1996; Tysset, Durand, & Taliergio, 1970). There have been supplemental studies that have isolated Bacillus megaterium in fish (Sumathi et al., 2017). Afrilasari et al., 2015 also successfully isolated Bacillus megaterium from catfish digestive tract and identified the strain as PTB 1.4. The nonhazardous nature of Bacillus megaterium has landed the bacteria on the Qualified Presumption of Safety (QPS) list (European Food Safety Authority, 2017). Bacillus megaterium strain ATCC 14581 has been confirmed through genome-analysis to be nearly identical (>99%) to Bacillus megaterium MIT411. Health Canada stated the organism is not hazardous to human health or the environment; and exposure to the environment and Canadians is medium. Therefore, it is concluded that Bacillus megaterium strain ATCC 14581 is not harmful to human health or to the environment (Health Canada, 2018).

[0014] In summary, Bacilli strains with probiotic capabilities should be able to adhere to other suitable cells, such as the cell line Caco-2 cells. Moreover, it is also desirable that the Bacilli strains with probiotic capabilities show in vitro inhibitory activity against other bacterial species, produce acid after growth in liquid culture and/or produce hydrogen peroxide.

### SUMMARY OF THE INVENTION

[0015] It is an object of the present invention to provide strains and compositions as described throughout this application such as pharmaceutical formulations or absorbent products of suitable probiotic Bacilli strains with the desired properties. In an embodiment, the present invention concerns the Bacillus coagulans strain CGI314 alone or in combination with other strains such as Bacilli strains such as Bacillus megaterium strain MIT411 (disclosed and claimed in corresponding PCT Application PCT/US2022/xxxxx claiming priority from Irish Patent Application No. 2021/0211, whose contents are incorporated herein in their entirety) and Bacillus clausii strain CSI08 (disclosed and claimed in corresponding PCT Application PCT/US2022/xxxxx claiming priority from Irish Patent Application No. 2021/0209, whose contents are incorporated herein in their entirety). In an embodiment, these strains have similar or essentially the same advantageous properties e.g. the ability to colonize by adherence to mucosal membranes and which are therefore suited for the treatment or prevention of infections or diseases for instance such as the vaginal, urinary-tract, gastrointestinal, naso-sinal, pharyngeal, esophageal, oral, and/or other areas of the body with e.g. mucosal membranes, as well as, treatment or prevention of infections or diseases of the skin and/or other areas of the body having epithelium; immune health, protection against oxidative stress, cleansing and detoxification, metabolic health and cardiovascular health amongst others. such as providing antimicrobial activity including lactic acid, benzoic acid, and succinic acid, anti-inflammatory activity, suppression of pro-inflammatory response, activating and/or provoking immune response eg. by stimulating macrophages, providing immunoprotection, aiding in digestion and/or fermentation for instance in the gut, producing branched amino acides, essential amino acids and group B vitamins, maintaining healthy gut and/or skin including lactic acid benzoic acid, and succinic acid in support of skin health, protection of mucosal and other epithelial tissues from toxic agents, decreasing incidence of loose stools, improving the gut-brain axis, and treating and/or preventing dysbiosis and its effects such as periodontal disease, inflammatory bowel disease, chronic fatigue syndrome, metabolic disorders, cardiac disorders, respiratory trat infections, urinary tract infections, GI infections, and diarrhea; and restoring normal and/or healthy flora. In an embodiment, the present invention allows the use of Bacillus clausii strain CSI08 and compositions for use in fecal transplants.

[0016] Gastrointestinal diseases include, but are not limited to treating gastrointestinal irregularity in an individual, wherein the individual has at least one 24-hour episode per month of bowel movements measuring 1 or 2 on the Bristol Stool Scale (i.e. treating constipation; or wherein the individual has at least one 24-hour episode per month of bowel movements measuring 6 to 7 on the Bristol Stool Scale (tending towards diarrhoea), wherein the frequency of the individual's 24-hour episodes per month of bowel movements measuring 1 or 2 (or 6 to 7) on the Bristol Stool Scale decreases.

[0017] Also included is a method of restoring gastrointestinal regularity in an individual, wherein the individual has at least one 24-hour episode per month of bowel movements measuring 1 or 2; or 6 to 7 on the Bristol Stool Scale, wherein the frequency of 24-hour periods of the individual's bowel movements measuring from 3 to 5 on the Bristol Stool Scale increases.

[0018] The invention further includes maintaining healthy gut microflora, with Bacillus-containing composition(s). The Bacillus-containing composition(s) can be used as probiotic supplementation of the gastrointestinal microflora, and may compete with or otherwise discourage pathogenic bacteria in the gut such as Escherichia coli, Listeria monocytogenes, Salmonella spp.

[0019] Another object of the present invention is to provide pharmaceutical formulations with an increased ability to colonize by adherence to the mucosal membrane by employing mucous adhesive excipients.

[0020] It is a further object of the present invention to provide vaginal formulations with an increased ability to suppress the growth of Candida albicans and Gram-negative pathogenic bacteria.

[0021] It is yet another objective of the present invention to provide compositions such as dairy products, nutraceutical products and functional foods comprising Bacillus coagulans strain CGI314 alone or combination with other Bacilli strains such as a Bacillus megaterium strain and/or a Bacillus clausii strain, having essentially the same properties having the ability to colonize the mucosal membranes and therefore adapted to treatment or prevention of vaginal infections, urinary-tract infections and gastrointestinal diseases. Compositions of the present invention may be administered for 1 dose, 1 day, 1 day to 1 week, 1 day to 1 month, 1 month to 45 days, 45 days to 2 months, 3 months, 6 months, 1 year, or more, including any timeframe identified and/or falling within these ranges.

[0022] The present invention includes methods of treatment and/or preventions and various other methods, which may comprise the steps of providing a Bacillus coagulans strain or composition of this invention to a subject (for instance a mammal subject, a human including a human patient, and the like), and administering the strain or composition to the subject. In an embodiment, the present invention is directed to a composition, for instance use of a composition, to treat a disease or infection or other condition. In an embodiment, the present invention is directed to the use of a Bacillus coagulans strain or composition thereof, as described throughout this application (including its claims), in the manufacture of a medicament for the treatment of vaginal infections, urinary tract infections, gastrointestinal diseases, improving immune health, protection against oxidative stress, cleansing and detoxification, metabolic health, cardiovascular health, and/or skin health, and/or other treatments or other reasons for application described throughout this application.

### FIGURES

[0023] In the drawings:

[0024] FIG. 1 illustrates the phylogenetic tree (16S) of Bacillus spp, arranged in clades.

[0025] FIG. 2 illustrates the phylogenetic tree (gyrB) of Bacillus spp., arranged in clades.

[0026] FIG. 3 shows antimicrobial activity of B. coagulans CGI314 against gut, skin and urinary tract opportunistic pathogens on MRS agar plates with 0.4% TSA agar overlays (solid media). A—E. coli; B—S. enteritidis and C—S. aureus.

[0027] FIG. 4 shows B. coagulans CGI314 antimicrobial activity in liquid TSB media against gut, skin and urinary tract opportunistic pathogens. Pathogens: E. coli, Salmonella, Pseudomonas aeruginosa and S. aureus. (Concentration Log₁₀ CFU/ml)

[0028] FIG. 5 shows the strongest antimicrobial activity observed with B. coagulans CGI314 (Fortispore) against E. coli at 24 hr. (a) B. coagulans MTCC5856 (Lactospore®) (b) B. coagulans CG314 (Fortispore) (c) B. coagulans 6086 (BC30™) inoculated on MRS agar against E. coli 0.4% TSA agar overlay plates.

[0029] FIG. 6 shows the strongest antimicrobial activity observed with Fortispore against S. enteritidis at 48 hr. (a) Lactospore® (b) Fortispore (c) BC30™ inoculated on MRS agar against S. enteritidis 0.4% TSA agar overlay plates.

[0030] FIG. 7 shows no antimicrobial activity was detected across Bacillus coagulans against P. aeruginosa (a) B. coagulans MTCC5856 (Lactospore®) (b) B. coagulans CG314 (c) B. coagulans 6086 (BC30™) inoculated on TSA agar against P. aeruginosa 0.4% TSA agar overlay plates at 24 hr.

[0031] FIG. 8 shows limited antimicrobial detected across B. coagulans against S. aureus using MRS agar at 24 hr. (a) B. coagulans inoculated on TSA agar against S. aureus 0.4% TSA agar overlay plates. (b) B. coagulans inoculated on MRS agar against S. aureus 0.4% TSA agar overlay plates.

[0032] FIG. 9 shows total antioxidant capacity of B. coagulans (Fortispore) and L. rhamnosus.

[0033] FIG. 10 shows total antioxidant capacity of DE111, B. coagulans (Fortispore), B. clausii CSI08 (Munispore), B. megaterium MIT411 (Renuspore) and L. rhamnosus.

[0034] FIG. 11 shows adherence of Fortispore to the HT-29 cell line, measured as percentage of adherence bacteria, was negligible.

[0035] FIG. 12 shows adherence of Fortispore to the HT-29-MTX cell line, measured as percentage of adherence bacteria, is negligible.

[0036] FIG. 13 shows a study on the adherence of B. coagulans strains to the HT-29 cell line.

[0037] FIG. 14 show a study on the adherence of B. coagulans strains to the HT-29-MTX cell line.

[0038] FIG. 15 shows the absence of caseolytic activity in B. coagulans CGI314 using both streak and overnight TSB broth method at 24 h or 48 h.

[0039] FIG. 16 shows proteolytic activity of Fortispore towards casein derivatives is lower than positive control Proteinase K using EnzCheck® kit following incubation at 37° C. for 24 h.

[0040] FIG. 17 shows absence of caseolytic activity across (left to right) B. coagulans CGI314, 20 B. coagulans 6086 (BC30™) and B. coagulans MTCC5856 (Lactospore®) using both streak and overnight TSB broth method at 24 h or 48 h.

[0041] FIG. 18 shows Fortispore B. coagulans showing low protease activity towards casein.

[0042] FIG. 19 shows a quantitative analysis of the caseolytic activity across B. coagulans strains determined by EnzCheck® kit following incubation at 37° C. for 24 h.

[0043] FIG. 20 shows FAA profile of Fortispore UTH fermented milk. Relative concentrations of Methionine, Alanine, Proline, Tryptophan, Lysine, cis-Aconitic acid are shown (white bar (left) represents Control).

[0044] FIG. 21 shows FAA profile of Fortispore UTH fermented milk. Relative concentrations of Succinic acid, Lactic acid, Benzoic acid, Isocitric acid are shown (white bar (left) represents Control).

[0045] FIG. 22 compares Fortispore with Lactospore and BC30 in the production of Lactic acid, Succinic acid, and Benzoic acid (left to right: Control, BC30, Lactospore, Fortispore).

[0046] FIG. 23 compares Fortispore with Lactospore and BC30 in the production of amino acids (left to right: Control, BC30, Lactospore, Fortispore; also, showing relative concentrations of Methionine, Proline, Tryptophan, Lysine).

[0047] FIG. 24 shows Fibersol® (F) significantly increased the concentration (CFU/mL) of Fortispore by 1 log₁₀ in minimal media 24 hours post incubation compared to controls.

[0048] FIG. 25 shows Fibersol® (F) significantly increases the concentration (CFU/mL) of Fortispore in Minimal media whereas no significance in the growth of BC30 and Lactospore were seen.

[0049] FIG. 26 shows that Fibersol® (F) did not show significant increase in the concentration (CFU/mL) of Fortispore in TSB media compared to controls.

[0050] FIG. 27 shows Fibersol® (F) did not show significant increase in the concentration (CFU/mL) of DE111, Fortispore, BC30, E. coli and Salmonella enteritidis in TSB media compared to controls.

[0051] FIG. 28 shows Fibersol® (F) did not significantly increase the concentration (CFU/mL) of Fortispore in 50% TSB media compared to controls.

[0052] FIG. 29 shows Fibersol® (F) significantly increased the yield (CFU/mL) of DE111 by 1 log₁₀ after 24 hours in 50% TSB media.

[0053] FIG. 30 shows that Fibersol® (F) did not show significant increase in the concentration (CFU/mL) of Fortispore compared to controls in BHI media.

[0054] FIG. 31 shows that Fibersol® (F) did not show significant increase in the concentration (CFU/mL) of DE111, Fortispore and BC30 compared to controls in BHI media.

[0055] FIG. 32 shows that Fibersol® (F) did not show significant increase in the concentration (CFU/mL) of Fortispore compared to controls in 50% BHI media.

[0056] FIG. 33 shows that Fibersol® (F) did not show significant increase in the concentration (CFU/mL) of DE111, Fortispore and BC30 compared to controls in 50% BHI media.

### DETAILED DESCRIPTION OF THE INVENTION

### Genotypic Identification

[0057] The Applicant collaborated with Cornell University (Ithaca NY, USA) for genomic sequencing and identification.

### WGS DNA Composition

[0058] The whole genome sequence (WGS) was carried out by Cornell University, including assembly and annotation. Bioinformatics analysis was completed at Cornell University and at Deerlands Probiotics and Enzymes (Kennesaw, GA, USA). Identifying gyrB gene poymorphism was carried out the the Applicant.

[0059] The gyrB gene encodes DNA gyrase subunit B. DNA gyrase negatively supercoils closed circular double-stranded DNA in an ATP-dependent manner to maintain chromosomes in an underwound state. Gene sequencing analysis used the gyrB gene polymorphism, a well-established method for species level discrimination of prokaryotes (Bavykin et al., 2014; Wang et al., 2007). The representative genomes ere reviewed and curated by NCBI, and coordinated with the UniProtein Consortium (NCBI, 2016; UniProt, 2016). R package SequinR coupled with the UniProt Consortium analysis was used to compare whole genome sequences (WGS) and GyrB sequence of the presently claimed Bacillus coagulans strain CGI314 with other reference strains (Tables 1 to 3 below)

Genotypic, gyrB, & 16S rRNA Identification of Bacillus coagulans CGI314

[0060] CGI314 was isolated, and the genome was considered successful.

[0061] The genome size (3.0 Mbp) of CGI314 was shorter than that of previously sequenced B. coagulans strain (3.4 Mbp) (Upadrasta et al., 2016). The % GC (47.3%) is consistent with that of a previously sequenced B. coagulans strain (46.5%) (Upadrasta et al., 2016).

TABLE 1
Whole genome sequencing metrics of CGI314

| | Number of | Total | GC | N50 | Average |
|---|---|---|---|---|---|
| Strain | contigs | length (nt) | (%) | (nt) | Coverage (x) |
| Bacillus | 210 | 3,028,595 | 47.30 | 29,700 | 71 |
| coagulans | | | | | |
| CGI314 | | | | | |

TABLE 2
Distance matrix of gyrB gene

| Bacillus | | | | |
|---|---|---|---|---|
| coagulans subsp. | ATCC 7050 | BC-30 | IS-2 | MTCC 5856 |
| CGI314 | 99.9% | 95.2% | 95.2% | 95.2% |

TABLE 3
Whole genome sequence comparison

| Bacillus | | | Sequence |
|---|---|---|---|
| coagulans subsp. | Accession No. | % GC | Length |
| CGI314 | JABBFU000000000.1 | 47.30% | 3,028,595 |
| ATCC 7050 | NZ_CP009709.1 | 46.90% | 3,366,995 |
| BC-30 | JPSK01000000 | 46.39% | 3,458,616 |
| IS-2 | JZDH01000000 | 46.41% | 3,446,692 |
| MTCC 5856 | NZ_CP011939.1 | 46.23% | 3,694,837 |

16S rRNA

[0062] Whole genome sequencing (WGS) and 16S rRNA analysis of CGI314, as compared to the four reference strains, exhibited an average nucleotide identity (ANI) score for 16S rRNA of 99.9% when compared to the B. coagulans strain ATCC 7050. The genome size (3.0 Mbp) and GC content (47.30%) for CGI314 was comparable to the four reference strains.

### Further Deposits and Accession Numbers

[0063] Genome sequence data of Bacillus coagulans strain CGI314 (Fortispore) was deposited into NCBI GenBank database, and the genome sequence was annotated with the NCBI Prokaryotic Genome Annotation Pipeline (PGAP). The genome is publicly available, with GenBank Accession Number JABBFU000000000.1 for the strain, and available for instance at the link: https://www.ncbi.nlm.nih.gov/nuccore/JABBFU000000000.1.

[0064] Genome sequence data of Bacillus clausii strain CSI08 (Munispore) was deposited into NCBI GenBank database, and the genome sequence was annotated with the NCBI Prokaryotic Genome Annotation Pipeline (PGAP). The genome is publicly available, with GenBank Accession Number JABBNL000000000.1 for the strain, and available for instance at the link: Alkalihalobacillus clausii strain CSI08, whole genome shotgun sequenci—Nucleotide—NCBI (nih.gov).

[0065] Genome sequence data of Bacillus megaterium strain MIT411 (Renuspore) was deposited into NCBI GenBank database, and the genome sequence was annotated with the NCBI Prokaryotic Genome Annotation Pipeline (PGAP). The genome is publicly available, with GenBank Accession Number JABBNK000000000.1 for the strain, and available for instance at the link: Priestia megaterium strain MIT411, whole genome shotgun sequencing pro—Nucleotide—NCBI (nih.gov).

[0066] Phylogenetic Placement, carried out by Deerland Probiotics and Enzymes, Inc.

[0067] Genome-to-genome distance calculation (GGDC), a digital gold standard, is as reliable as DNA-DNA hybridization (DDH) (Auch et al. 2010). GGDC holds more discriminatory power for subspecies delineation and subsequently, was used as a confirmation of multiple alignment and phylogenetic analyses. GGDC yielded calculation-based models that further verified that Bacillus coagulans CGI314 is a close relative to ATCC 7050.

[0068] Although the conserved 16S rRNA sequence is a well-established method to compare and study phylogenies in bacteria, the high proportion of sequence similarity between closely related species limits its usefulness (Wang et al., 2007). High rates of 16S rRNA sequence similarity in closely related bacterial species are due to a slower rate of molecular evolution. Past research (Bavtlin et al., 2004; Wang et al., 2007) supports the validity of using gyrB sequences as taxomonic biomarkers due to their rate of base substitutions and significant and reliable correlation with DNA-DNA Hybridization analysis (Dauga et al., 2002; Kasai et al., 1998; Wang et al., 2007). The gyrB encodes DNA gyrase B, and type II topoisomerase that plays an important role in DNA replication. Gyrase B subunits are encoded by the gyrB gene.

[0069] Phylogenetic analysis using neighbor-joining (NJ) method (Saitou & Nei, 1987) placed Bacillus coagulans CGI314 in a clade with Bacillus coagulans ATCC 7050 (FIG. 2). This confirms all previous genomic identity determinations. Bacillus coagulans CGI314 has been placed in the Bacillus coagulans group.

### Definitions

[0070] By “excipient” is meant any non-active ingredient that is added to form part of the final formulation.

[0071] By “probiotic” is meant a viable microbial supplement, which has a beneficial influence on the patient through its effects in the intestinal tract, urinary tract or the vaginal tract. The term “probiotic(s)” can refer to live microorganisms which, when administered in adequate amounts, confer a health benefit on the host. Foods and food additives containing probiotics may support the restoration of the healthy balance of the gut microflora. Further, probiotic supplementation of the intestinal flora may promote healthy intestinal homeostasis.

[0072] A “prebiotic” is used herein as a substrate, which has a beneficial effect on a probiotic and thus on the individual patient taking the probiotic. Suitable prebiotics may be selected from an inulin, an oligosaccharide, and/or a vitamin.

[0073] A “subject” is used herein includes a person suffering from any clinical condition related to a microbial imbalance as well as a person using bacterial preparations prophylactically. Optionally, the subject is a human.

[0074] By a “symbiotic product” is meant a combination of probiotic and prebiotic, which is synergy, have a beneficial influence on the patient.

[0075] By “hardy growth” is meant that bacteria show excellent growth.

[0076] The abbreviation “CFU” means colony forming units.

[0077] The present invention relating to a probiotic Bacilli strain capable of regenerating the in vivo flora in subjects will become apparent in the progress of the following detailed description.

[0078] According to a first aspect, the present invention comprises Bacillus coagulans CGI314 alone or in combination with other probiotic Bacilli strains with essentially the same properties. Such other probiotic Bacilli stains may include, but are not limited to a Bacillus clausii strain and a Bacillus megaterium strain. Such other Bacilli strains may further include a Bacillus clausii strain and a Bacillus megaterium strain each filed today under these respective titles—their contents are incorporated herein in their entirety.

[0079] SEQ ID NO: 1, as recited in the claims attached hereto, comprises gyrB of Bacillus coagulans CGI314.

[0080] SEQ ID NO: 2, as recited in the claims attached hereto, comprises 16S rRNA of Bacillus coagulans CGI314.

[0081] SEQ ID NO: 3, as recited in the claims attached hereto, comprises the assembled whole genome sequence of Bacillus coagulans CGI314.

[0082] The Bacillus strain claimed herein, with reference to at least 97% identity to SEQ ID NO: 1 and/or 2; or to at least 97% identity to SEQ ID NO: 3, has the following properties:

[0083] Bacillus coagulans CGI314

[0084] The strain shows bile stability.

[0085] The strain shows acid stability.

[0086] The strain show heat tolerance.

[0087] The strain produces a natural antibiotic substance in the form of a bacteriocin.

[0088] In order to determine the genus and species of the strains disclosed herein, the whole genome was sequenced. The amount and composition of the strains were identified and determined.

[0089] The strain was shown to possess little to no antibiotic resistance and no safety concerns.

[0090] The strain was found to show stability toward acid and bile.

[0091] According to a second aspect, the Bacilli strain of the present invention is suitable for medical use in preventing or treating vaginal infections, urinary tract infections and gastrointestinal diseases (including gastrointestinal infections), as well as, improving immune health, protection against oxidative stress, cleansing and detoxification, metabolic health and cardiovascular health.

[0092] In another preferred embodiment, a pharmaceutical composition is provided comprising Bacillus coagulans CGI314 alone or in combination with other probiotic Bacilli strains with essentially the same properties, together with a pharmaceutically acceptable carrier and/or diluent. Such other probiotic Bacilli stains include, but are not limited to a Bacillus clausii strain and a Bacillus megaterium strain. The bacterial strains are formulated into pharmaceutical formulations in order to allow the easy administration of the probiotic strains and by means known to the man skilled in the art.

[0093] Bacillus coagulans has been proven able to alleviate symptoms of irritable bowel syndrome (Sudha et al., 2018), improve muscle integrity and cytokine response (Gepner et al., 2017; Jager et al., 2018), modulate the gut microbiome and the immune response (Kimmel et al., 2010), reduce function intestinal gas symptoms (Kalman et al., 2009), reduce the instance and duration of diarrhea (Dolin et al., 2009), improve the symptoms of functional abdominal pain and bloating (Hun et al., 2009), protect against acetaminophen induced acute liver injury (Neag et al., 2020), enhance butyrogenesis (Sasaki et al., 2020), reduce severity of bacterial vaginosis (Sudha et al., 2012), and reduce cholesterol (Sudha et al., 2012) all in vivo. Bacillus coagulans has also shown to induce immune response and anti-inflammatory action (Jensen et al., 2017), improve plant protein digestion (Keller et al., 2017), adhere to Caco-2 cells (Sharma & Kanwar, 2017), improve colonic microenvironment in patients with ulcerative colitis (Sasaki et al., 2020), reduce the adhesion, cytotoxicity and induction of apoptosis caused by S. typhimurium in HT-29 cells (Kawarizadeh et al., 2019), hydrolyze lactose from whey protein (Liu et al., 2019), and enhancing t-cell response (Baron, 2009) all in vitro.

[0094] Bacillus clausii has been proven efficacious in preventing recurrent respiratory infections (Marseglia et al., 2007), reducing duration and severity of diarrhoea (Sudha et al., 2019) in vivo. Bacillus clausii has also been proven capable to produce protein hydrolysates with antimicrobial and antioxidant capacity (Rochin-Medina et al., 2017), protect against acetaminophen induced acute liver injury (Neag et al., 2020), inhibit cytotoxic effects induced by Clostridium difficile and Bacillus cereus toxins (Ripert et al., 2016) in vitro.

[0095] Bacillus megaterium has been shown to exert protective effects against oxidative stress both in vitro and in vivo (Mazzoli et al., 2019). Bacillus megaterium has also been shown capable of adapting and surviving in acid stress conditions and chelating heavy metals in vitro (Ferreira et al., 2019).

[0096] Preferably, the probiotic bacteria employed in a pharmaceutical in accordance with the present invention are used in bacterial concentration of 10⁶-10¹³. In an embodiment, the probiotic bacteria employed in this invention are used in bacterial concentration of 10⁶-10¹³ CFU (colony forming units), for instance as a daily dose, including any amount or range that is included in said range. In an embodiment, the bacteria are employed in an amount of 10⁷-10¹² CFU, or 108-10¹¹ CFU, or 10⁹-10¹⁰ CFU, or for instance in an amount of about 10⁶, about 10⁷, about 108, about 10⁹, about 10¹⁰, about 10¹¹, about 10¹², and/or about 10¹³ CFU, and any amount or range including or between said amounts. In an embodiment, a composition of this invention comprises, consists essentially of, consists of, and/or is characterized by about 10⁶- about 10¹³ CFU such as about 10⁹ Bacillus coagulans CGI314. In an embodiment, a composition of this invention comprises Bacillus coagulans CGI314 (for instance about 10⁹ CFU) in combination with Bacillus megaterium MIT411 and/or Bacillus clausii CSI08. In an embodiment, a composition of this invention is orally administered in capsule form. In an embodiment, in a composition and/or use or method of this invention, Bacillus coagulans CGI314 is in spore form, or is not in spore form.

[0097] In certain embodiments, compositions comprising Bacillus coagulans CGI314 can include one or more dry carriers selected from the group consisting of trehalose, maltodextrin, rice flour, microcrystalline cellulose, magnesium stearate, inositol, fructooligosaccharide, galactooligosaccharide, dextrose, dried dairy products, and the like. In certain embodiments, the dry carrier can be added to the compositions comprising Bacillus coagulans CGI314 in a weight percentage of from about 1% to about 95% by weight of the composition.

[0098] In certain embodiments, the compositions comprising Bacillus coagulans CGI314 can include one or more liquid or gel-based carriers, selected from the group consisting of water and physiological salt solutions, urea, alcohols and derivatives thereof (e.g., methanol, ethanol, propanol, butanol), glycols (e.g., ethylene glycol, propylene glycol), and the like; natural or synthetic flavorings and food-quality coloring agents, all compatible with the organism; thickening agents selected from the group consisting of corn starch, guar gum, xanthan gum, and the like; one or more spore germination inhibitors selected from the group consisting of hyper-saline carriers, methylparaben, guargum, polysorbate, preservatives, and the like. In certain embodiments, the one or more liquid or gel-based carrier(s) can be added to the compositions comprising Bacillus coagulans CGI314 in a weight/volume percentage of from about 0.6% to about 95% weight/volume of the composition. In certain embodiments, the natural or synthetic flavoring(s) can be added to the compositions comprising Bacillus coagulans CGI314 in a weight/volume percentage of from about 3.0% to about 10.0% weight/volume of the composition. In certain embodiments, the coloring agent(s) can be added to the compositions comprising Bacillus coagulans CGI314 in a weight/volume percentage of from about 1.0% to about 10.0% weight/volume of the composition. In certain embodiments, the thickening agent(s) can be added to the compositions comprising Bacillus coagulans CGI314 in a weight/volume percentage of about 2% weight/volume of the composition. In certain embodiments, the one or more spore germination inhibitors can be added to the compositions comprising Bacillus coagulans CGI314 in a weight/volume percentage of about 1% weight/volume of the composition.

### Delivery System

[0099] Suitable dosage forms include tablets, capsules, solutions, suspensions, powders, gums, and confectionaries. Sublingual delivery systems include, but are not limited to, dissolvable tabs under and on the tongue, liquid drops, and beverages. Edible films, hydrophilic polymers, oral dissolvable films, or oral dissolvable strips can be used. Other useful delivery systems comprise oral or nasal sprays or inhalers, and the like. Suitable dosage forms include tablets, capsules, solutions, suspensions, powders, gums, and confectionaries. Sublingual delivery systems include, but are not limited to, dissolvable tabs under and on the tongue, liquid drops, and beverages. Edible films, hydrophilic polymers, oral dissolvable films, or oral dissolvable strips can be used. Other useful delivery systems comprise oral or nasal sprays or inhalers, and the like.

[0100] For oral administration, probiotics may be further combined with one or more solid inactive ingredients for the preparation of tablets, capsules, pills, powders, granules, or other suitable dosage forms. For example, the active agent may be combined with at least one excipient selected from the group consisting of fillers, binders, humectants, distintegrating agents, solution retarders, absorption accelerators, wetting agents, absorbents, and lubricating agents. Other useful excipients include, but are not limited to, magnesium stearate, calcium stearate, mannitol, xylitol, sweeteners, starch, carboxymethylcellulose, microcrystalline cellulose, silica, gelatin, silicon dioxide, and the like

[0101] In certain embodiments, the components of compositions administered according to the methods of the present disclosure, together with one or more conventional adjuvants, carriers, or diluents, may thus be placed into the form of pharmaceutical compositions and unit dosages thereof. Such forms include: solids, and in particular, tablets, filled capsules, powder and pellet forms; liquids, and in particular, aqueous or non-aqueous solutions, suspensions, emulsions, elixirs; and capsules filled with the same; all for oral use, suppositories for rectal administration, and sterile injectable solutions for parenteral use. Such pharmaceutical compositions and unit dosage forms thereof may comprise conventional ingredients in conventional proportions, with or without additional active compounds or principles, and such unit dosage forms may contain any suitable effective amount of the active ingredient commensurate with the intended daily dosage range to be employed.

[0102] The components of the compositions administered according to the methods of the present disclosure can be administered in a wide variety of oral and parenteral dosage forms. It will be obvious to those skilled in the art that the following dosage forms may comprise, in certain embodiments, as the active component, either a chemical compound of the present disclosure or a pharmaceutically acceptable salt of a chemical compound of the present disclosure.

[0103] For preparing pharmaceutical compositions to be administered according to the methods of the present disclosure, pharmaceutically acceptable carriers can be either solid or liquid. Solid form preparations include powders, tablets, pills, capsules, cachets, suppositories, and dispersible granules. A solid carrier can be one or more substances that may also act as diluents, flavoring agents, solubilizers, lubricants, suspending agents, binders, preservatives, tablet disintegrating agents, or encapsulating materials.

[0104] In powders, the carrier is a finely divided solid, which is in a mixture with the finely divided active component. In tablets, the active component is mixed with the carrier having the necessary binding capacity in suitable proportions and compacted in the shape and size desired.

[0105] In certain embodiments, powders and tablets administered according to methods of the present disclosure preferably may contain from five or ten to about seventy percent of the active compound. Suitable carriers are magnesium carbonate, magnesium stearate, talc, sugar, lactose, pectin, dextrin, starch, gelatin, tragacanth, methylcellulose, sodium carboxymethylcellulose, a low melting wax, cocoa butter, and the like. The term “preparation” is intended to include the formulation of the active compound with encapsulating material as carrier providing a capsule in which the active component, with or without additional carriers, is surrounded by a carrier, which is thus in association with it. Similarly, cachets and lozenges are included. Tablets, powders, capsules, pills, cachets, and lozenges are included. Tablets, powders, capsules, pills, cachets, and lozenges can be used as solid forms suitable for oral administration.

[0106] Liquid preparations include, but are not limited to, solutions, suspensions, and emulsions, for example, water or water-propylene glycol solutions. For example, parenteral injection liquid preparations can be formulated as solutions in aqueous polyethylene glycol solution. In certain embodiments, chemical compounds administered according to methods of the present disclosure may thus be formulated for parenteral administration (e.g., by injection, for example, bolus injection or continuous infusion) and may be presented in unit dose for administration in ampoules, pre-filled syringes, small-volume infusion, or in multi-dose containers with an added preservative.

[0107] The compositions may take such forms as suspensions, solutions, or emulsions in oily or aqueous vehicles, and may contain formulation agents such as suspending, stabilizing, and/or dispersing agents. Alternatively, the active ingredient may be in powder form, obtained by aseptic isolation of sterile solid or by lyophilization from solution, for constitution with a suitable vehicle, e.g., sterile, pyrogen-free water, before use.

[0108] Aqueous solutions suitable for oral use can be prepared by dissolving the active component in water and adding suitable colorants, flavors, stabilizing and thickening agents, as desired. Aqueous suspensions suitable for oral use can be made by dispersing the finely divided active component in water with viscous material, such as natural or synthetic gums, resins, methylcellulose, sodium carboxymethylcellulose, or other well-known suspending agents.

[0109] Compositions suitable for topical administration in the mouth include, but are not limited to: lozenges comprising the active agent in a flavored base, usually sucrose and acacia or tragacanth; pastilles comprising the active ingredient in an inert base such as gelatin and glycerine or sucrose and acacia; and mouthwashes comprising the active ingredient in suitable liquid carrier.

[0110] Solutions or suspensions are applied directly to the nasal cavity by conventional means, for example, with a dropper, pipette, or spray. The compositions may be provided in single or multi-dose form. In compositions intended for administration to the respiratory tract, including intranasal compositions, the compound will generally have a small particle size, for example, of the order of 5 microns or less. Such a particle size may be obtained by means known in the art, for example, by micronization.

[0111] The pharmaceutical preparations are preferably in unit dosage forms. In such form, the preparation is subdivided into unit doses containing appropriate quantities of the active component. The unit dosage form can be a packaged preparation, the package containing discrete quantities of preparation, such as packaged tablets, capsules, and powders in vials or ampoules. Also, the unit dosage form can be a capsule, tablet, cachet, or lozenge itself; or it can be the appropriate number of any of these in packaged form.

[0112] Tablets, capsules, and lozenges for oral administration and liquids for oral use are preferred compositions. Solutions or suspensions for application to the nasal cavity or to the respiratory tract are preferred compositions. Transdermal patches for topical administration to the epidermis are preferred.

[0113] Further details on techniques for formulation and administration may be found in the latest edition of REMINGTON'S PHARMACEUTICAL SCIENCES (Mack Publishing Co., Easton, PA).

[0114] In certain embodiments, compositions of the present invention including compositions administered according to the methods of the present disclosure may also include one or more excipients, most preferably one or more nutraceutical or pharmaceutical excipients. Compositions containing one or more excipients and incorporating one or more probiotics can be prepared by procedures known in the art. Optionally, compositions can include one or more adjuvants, excipients, carriers, buffers, diluents, and/or other customary pharmaceutical auxiliaries. For example, probiotics can be formulated into tablets, capsules, powders, suspensions, solutions for oral administration, solutions for parenteral administration including intravenous, intradermal, intramuscular, and subcutaneous administration, and solutions for application onto patches for transdermal application with common and conventional barriers, binders, diluents, and excipients.

[0115] In certain embodiments, nutraceutical compositions including nutraceutical compositions administered according to the methods of the present disclosure may include and may be administered in combination with a pharmaceutically acceptable carrier. In certain embodiments, the active ingredients in such formulations may comprise from about 1% by weight to about 99% by weight. In other embodiments, the active ingredients in such formulations may comprise from about 0.1% by weight to about 99.9% by weight. “Pharmaceutically acceptable carrier” means any carrier, diluent, or excipient that is compatible with the other ingredients of the formulation and not deleterious to the user. Useful excipients include, but are not limited to, microcrystalline cellulose, magnesium stearate, calcium stearate, any acceptable sugar (e.g., mannitol, xylitol), and the like, and for cosmetic use, a water or an oil base may be used, or mixture thereof including such as an emulsion.

### Routes of Administration

[0116] The strain Bacillus coagulans CGI314 or a composition comprising a strain of the present invention may be administered by any route, including, but not limited to, oral, sublingual, buccal, ocular, pulmonary, rectal, vaginal, urethral, ureteral, and parenteral administration, or as an oral or nasal spray (e.g., inhalation of nebulized vapors, droplets, or solid particles). Parenteral administration includes, for example, intravenous, intramuscular, intraarterial, intraperitoneal, intranasal, intravaginal, intravesical (e.g., to the bladder), intradermal, transdermal, topical, or subcutaneous administration. Also contemplated within the scope of the invention is the instillation of a pharmaceutical composition in the body of the patient in a controlled formulation, with systemic or local release of the drug to occur at a later time. For example, the drug may be localized in a depot for controlled release to the circulation, or for release to a local site.

[0117] Pharmaceutical compositions of the invention may be those suitable for, and formulated for, any of the routes identified above, including for instance oral, rectal, bronchial, nasal, pulmonal, topical (including buccal and sub-lingual), transdermal, vaginal, urethral, ureteral, or parenteral (including cutaneous, subcutaneous, intramuscular, intraperitoneal, intravenous, intraarterial, intracerebral, intraocular injection, or influsion) administration, or those in a form suitable for administration by inhalation or insufflation, including powders and liquid aerosol administration, or by sustained release systems. Suitable examples of sustained release systems include semipermeable matrices of solid hydrophobic polymers containing the compound of the invention, which matrices may be in the form of shaped articles, e.g., films or microcapsules.

[0118] The embodiments described above may be further understood in connection with the following Examples. In addition, the following non-limiting examples are provided to illustrate 5 the invention. However, the person skilled in the art will appreciate that it may be necessary to vary the procedures for any given embodiment of the invention, e.g., vary the order or steps.

### Example 1

### Characterisation of Bacillus coagulans CGI314 (Referred to as Fortispore Hereinafter)

[0119] B. coagulans CGI314 (Fortispore) had significant antimicrobial activity against E. coli, Salmonella and S. aureus in solid MRS agar overlayed with 0.4% TSA agar.

[0120] However, no antimicrobial activity was observed against P. aeruginosa in solid media. Fortispore has antimicrobial activity against gut, urinary and skin pathogens in solid environments.

TABLE 4
Summary of B. coagulans CGI314 antimicrobial activity against
gut, skin and urinary tract opportunistic pathogens (solid media)

| Probiotic | Zone of inhibition diameter (mm) | | | |
|---|---|---|---|---|
| strain | E. coli | S. enteritidis | S. aureus | P. aeruginosa |
| Fortispore | 28.60 ± 4.10 | 33.40 ± 4.28 | 20.67 ± 0.58 | — |
| CGI314 | | | | |

[0121] Antimicrobial activity is indicated as zone of inhibition (mm)±standard deviation.

[0122] FIG. 3 shows antimicrobial activity of B. coagulans CGI314 against gut, skin and urinary tract opportunistic pathogens on MRS agar plates with 0.4% TSA agar overlays (solid media). A—E. coli; B—S. enteritidis and C—S. aureus.

[0123] Fortispore had significant antimicrobial activity against E. coli, Salmonella and P. aeruginosa in liquid TSB media. However, no antimicrobial activity was observed against S. aureus in liquid TSB media.

TABLE 5
Summary of Fortispore antimicrobial activity against gut, skin
and urinary tract opportunistic pathogens (liquid media)

| | Inhibition capacity | | | |
|---|---|---|---|---|
| Conditions | E. coli | S. enteritidis | S. aureus | P. aeruginosa |
| Solid media | + | + | + | − |
| Liquid media | + | + | − | + |

[0124] Antimicrobial activity detected (+), no antimicrobial activity observed (−).

[0125] FIG. 4 shows B. coagulans CGI314 antimicrobial activity in liquid TSB media against gut, skin and urinary tract opportunistic pathogens. Pathogens: E. coli, Salmonella, Pseudomonas aeruginosa and S. aureus. Control represents growth of pathogen individually; treatment represents growth of pathogen in the presence of B. coagulans CGI314. **p<0.01, ***p<0.001, ****p<0.0001.

[0126] Fortispore has potential to control the presence of opportunistic pathogens in the gut and urinary tract where semi-liquid to liquid conditions will be common. Moreover, Fortispore has the potential to prevent the spread of opportunistic pathogens on dryer environments such as the human skin.

[0127] Fortispore has higher antimicrobial activity than the competitor B. coagulans probiotics The antimicrobial activity of B. coagulans CGI1314 (Fortispore) was compared with that of B. coagulans MTCC5856 (Lactospore®) and B. coagulans 6086 (BC30™) using the agar diffusion method against the following opportunistic and zoonotic pathogens of the human skin and the gut:
[0128] Escherichia coli 25922,
[0129] Salmonella enteritidis 13076,
[0130] Staphylococcus aureus RF122, and
[0131] Pseudomonas aeruginosa DSM3227.

[0132] B. coagulans CGI314 (Fortispore) demonstrated stronger antimicrobial activity against E. coli at 24 h and S. enteritidis at 48 h than BC30™ and Lactospore®. Fortispore may have a higher potential to control the presence of opportunistic and zoonotic pathogens that may be present in the gut or on the skin of humans: High antimicrobial activity of Fortispore against E. coli.

[0133] High antimicrobial activity of Fortispore against S. enteritidis at 48 hr.

[0134] No Antimicrobial activity detected across Bacillus coagulans against P. aeruginosa.

[0135] Limited antimicrobial activity of Bacillus coagulans against S. aureus using TSA agar.

Antimicrobial Activity—High Antimicrobial Activity Against E. coli:

[0136] B. coagulans CGI314 (Fortispore) had the strongest antimicrobial activity against E. coli tested using MRS agar. B. coagulans MTCC5856 (Lactospore®) and B. coagulans 6086 (BC30™) had limited antimicrobial activity.

TABLE 6
Larger zone of inhibition achieved with B. coagulans
CGI314 (Fortispore) strain against E. coli.

| | Zone of inhibition diameter (mm) against E. coli | | |
|---|---|---|---|
| | Rep 1 | Rep 2 | Rep 3 |
| Fortispore | 10 ± 0 | 9.5 ± 0.7 | 9 ± 1.4 |
| Lactospore ® | 2.5 ± 0.7 | — | 3 ± 0 |
| BC30 ™ | 4.5 ± 0.7 | 5 ± 1.4 | 4.5 ± 0.7 |

Values represent average inhibition±standard deviation (n=2).

[0137] FIG. 5 shows the strongest antimicrobial activity observed with B. coagulans CGI314 (Fortispore) against E. coli at 24 hr. (a) B. coagulans MTCC5856 (Lactospore®) (b) B. coagulans CG314 (Fortispore) (c) B. coagulans 6086 (BC30™) inoculated on MRS agar against E. coli 0.4% TSA agar overlay plates.

[0138] Fortispore inhibited the growth of the opportunistic intestinal and urinary tract pathogen E. coli.

[0139] Antimicrobial activity—High antimicrobial activity of against S. enteritidis at 48 hr:

[0140] At 24 h, B. coagulans 6086 (BC30™) had the strongest antimicrobial activity against S. enteritidis. However, at 48 h, B. coagulans CGI314 (Fortispore) had the strongest antimicrobial activity against this pathogen.

TABLE 7
Larger zone of inhibition achieved with B. coagulans CGI314
(Fortispore) strain against S. enteritidis at 48 hours.

| | | |
|---|---|---|
| Rep 1 | Rep 2 | Rep 3 |

Zone of inhibition diameter (mm) against S. enteritidis at 24 h

| | | | |
|---|---|---|---|
| Fortispore | 6.5 ± 2.1 | 4.5 ± 0.7 | 4.5 ± 0.7 |
| Lactospore ® | 3.5 ± 0.7 | — | — |
| BC30 ™ | 10 ± 0 | 9 ± 1.4 | 6 ± 1.4 |

Zone of inhibition diameter (mm) against S. enteritidis at 48 h

| | | | |
|---|---|---|---|
| Fortispore | 11 ± 1.4 | 13.5 ± 2.12 | 8 ± 1.4 |
| Lactospore ® | 4 ± 1.4 | — | — |
| BC30 ™ | 10 ± 0 | 9.5 ± 0.7 | 7 ± 1.41 |

Values represent average inhibition±standard deviation (n=2).

[0141] FIG. 6 shows the strongest antimicrobial activity observed with Fortispore against S. enteritidis at 48 hr. (a) Lactospore® (b) Fortispore (c) BC30™ inoculated on MRS agar against S. enteritidis 0.4% TSA agar overlay plates.

[0142] Fortispore inhibited the growth of the zoonotic pathogen Salmonella that is known to affect the intestinal tract.

[0143] Antimicrobial activity—no antimicrobial activity detected across Bacillus coagulans against P. aeruginosa:

[0144] Using the agar diffusion method, no antimicrobial activity was observed across B. coagulans against P. aeruginosa.

[0145] FIG. 7 shows no antimicrobial activity was detected across Bacillus coagulans against P. aeruginosa (a) B. coagulans MTCC5856 (Lactospore®) (b) B. coagulans CG314 (c) B. coagulans 6086 (BC30™) inoculated on TSA agar against P. aeruginosa 0.4% TSA agar overlay plates at 24 hr.

[0146] Fortispore does not release antimicrobials against skin pathogen P. aeruginosa. However, Fortispore shows potential activity against P. aeruginosa in liquid medium (see Table 5 and FIG. 7).

[0147] Antimicrobial activity—Limited antimicrobial activity of Bacillus coagulans against S. aureus using MRS Agar:

[0148] Using TSA agar, there was no evidence of antimicrobial activity by B. coagulans strains against the S. aureus. However, B. coagulans 6086 (BC30™) and B. coagulans CGI1314 (Fortispore) did demonstrate slight activity against this pathogen using MRS agar.

TABLE 8
Narrow zones of inhibitions were detected across the three B. coagulans
strains against S. aureus at 24 hours using MRS agar.

| | Zone of inhibition diameter (mm) against S. aureus | | |
|---|---|---|---|
| | Rep 1 | Rep 2 | Rep 3 |
| Fortispore | 3.5 ± 0.7 | 2.5 ± 0.7 | 4.5 ± 0.7 |
| Lactospore ® | — | — | — |
| BC30 ™ | 4 ± 1.4 | 3 ± 1.4 | 5.5 ± 2.1 |

Values represent average inhibition±standard deviation (n=2).

[0149] FIG. 8 shows limited antimicrobial detected across B. coagulans against S. aureus using MRS agar at 24 hr. (a) B. coagulans inoculated on TSA agar against S. aureus 0.4% TSA agar overlay plates. (Left to right: BC30, CGI314, Lactospore). (b) B. coagulans inoculated on MRS agar against S. aureus 0.4% TSA agar overlay plates. (Left to right: CGI314, BC30, Lactospore).

[0150] Fortispore can release limited amounts of antimicrobials on dry surfaces such as skin against skin pathogen S. aureus.

[0151] Fortispore is a potential antioxidant probiotic:

[0152] Total antioxidant activity of Fortispore B. coagulans was compared with L. rhamnosus. Fortispore has a higher antioxidant activity than L. rhamnosus.

[0153] FIG. 9 shows total antioxidant capacity of B. coagulans and L. rhamnosus. Results show average concentration of Trolox equivalents in nmole/ml (n=3)±standard error.**p-value=0.0014.

[0154] The increased levels of Trolox equivalent concentration in Fortispore can neutralize and scavenge free radicals and prevent oxidative damage to the cells.

[0155] The Fortispore antioxidant activity is the second highest amount of antioxidant activity amongst all Deerland spores.

[0156] The total antioxidant activity of Fortispore B. coagulans was compared with B. megaterium MIT411, B. clausii CSI08, DE111 B. subtilis and L. rhamnosus. Fortispore has a high amount of antioxidant activity and is higher than L. rhamnosus.

[0157] FIG. 10 shows total antioxidant capacity of DE111, B. coagulans of the present invention, B. clausii CSI08, B. megaterium MIT411 and L. rhamnosus. Results show average concentration of Trolox equivalents in nmole/ml (n=3)±standard error.

[0158] The increased levels of Trolox equivalent concentration in Fortispore can neutralize and scavenge free radicals and prevent oxidative damage to the cells.

[0159] Fortispore (vegetative, non-spore form) did not adhere to intestinal epithelial cell line.

[0160] The adhesion ability of Bacillus coagulans strain (CGI314) to an in vitro model of intestinal epithelium was assessed. Adherence of B. coagulans strains CGI314 to HT-29 cell line was negligible at 37° C. Adhesion ability of B. coagulans CGI314 to the mucus producing cell line HT-29-MTX was negligible at 37° C.

[0161] FIG. 11 shows adherence of Fortispore to the HT-29 cell line was negligible.

[0162] FIG. 12 shows adherence of Fortispore to the HT-29-MTX cell line is negligible.

[0163] Fortispore strain does not adhere to intestinal mucus or epithelial cells.

[0164] The adhesion ability of various Bacillus coagulans strains (CGI314, BC30™ Lactospore®) to an in vitro model of intestinal epithelium was assessed. Adherence of B. coagulans strains CGI314, BC30™, Lactospore® to HT-29 cell line is negligible at 37° C. Adhesion ability of B. coagulans BC30™ to the mucus producing cell line HT-29-MTX is higher than B. coagulans CGI314 and Lactospore® at 37° C.

[0165] FIG. 13 shows a study on the adherence of B. coagulans strains to the HT-29 cell line.

[0166] FIG. 14 show a study on the adherence of B. coagulans strains to the HT-29-MTX cell line.

[0167] B. coagulans strains (liquid culture, non-spore form) do not adhere to intestinal mucus or epithelial cells.

[0168] Fortispore displays low caseolytic activity

[0169] Fortispore was negative for caseolytic activity on Skim milk agar plates. Quantitative analysis of Fortispore caseolytic activity was evaluated by using a commercial kit employing fluorescently tagged casein derivatives. Fortispore displayed low extracellular protease activity.

[0170] FIG. 15 shows a study on the absence of caseolytic activity in B. coagulans CGI1314 using both streak and overnight TSB broth method at 24 h or 48 h.

[0171] FIG. 16 shows proteolytic activity of Fortispore towards casein derivatives is lower than positive control Proteinase K using EnzCheck® kit following incubation at 37° C. for 24 h. Error bars present standard error (n=3).

[0172] Fortispore displays low protease activity towards Casein.

[0173] Amongst Deerland strains, Fortispore displays low extracellular protease activity towards casein derivatives.

[0174] FIG. 17 shows absence of caseolytic activity across B. coagulans CGI1314, B. coagulans 6086 (BC30™) and B. coagulans MTCC5856 (Lactospore®) using both streak and overnight TSB broth method at 24 h or 48 h.

[0175] FIG. 18 shows Fortispore B. coagulans showing least protease activity towards casein amongst Deerland strains.

[0176] FIG. 19 shows a quantitative analysis of the caseolytic activity across B. coagulans strains determined by EnzCheck® kit following incubation at 37° C. for 24 h. Significance is indicated by a, b and/or c, multiple letters indicate results are not significantly different from more than one group (P<0.05). Error bars present standard deviations.

[0177] In comparison to the comparators (Lactospore® and BC30™), Fortispore displayed superior protease activity towards casein.

### Fortispore's Diverse Carbohydrate Profile

[0178] Fortispore can metabolize a range of monosaccharides, disaccharides, sugar alcohols, amine sugars and polysaccharides.

[0179] Fortispore was positive for metabolism of 22 carbohydrates out of 49 tested using commercial API 50 CH strip. The majority of these carbohydrates were simple sugars such as D-Ribose, D-Glucose, D-galactose, D-Fructose, D-Mannose, and Disaccharides such as Trehalose, Maltose and Cellobiose etc. Additionally, there were compounds belonging to glycosylated hydroquinone (arbutin), cyanogenic glycoside (amygladin) and alcoholic P3-glucoside (Salicin) that Fortispore can metabolise.

TABLE 9
List of Carbohydrates that are effectively fermented by B. Coagulans (Fortispore,
BC30 ™, Lactospore ®) using API 50 Ch strips

| | B. coagulans | | B. coagulans |
|---|---|---|---|
| Carbohydrate | CGI1314 | Carbohydrate | CGI1314 |
| 1-ARABINOSE | + | AMYGDALIN | + |
| D-RIBOSE | + | ARBUTIN | + |
| D-XYLOSE | + | ESCULIN FERRIC CITRATE | + |
| D-GALACTOSE | + | S ALICIN | + |
| D-GLUCOSE | + | D-CELLOBIOSE | + |
| D-FRUCTOSE | + | D-MALITOSE | + |
| D-MANNOSE | + | D-MELIBIOSE | − |
| L-RHAMNOSE | − | D-TREHALOSE | + |
| D-MANNITOL | + | AMIDON | + |
| D-S ORBITOL | + | GENTIOBIOSE | + |
| METHYL-AD- | + | D-ARABITOL | (+) |
| GLUCOPYRANOSIDE | | | |
| N-ACETYL | + | POTASSIUM GLUCONATE | + |
| GLUCOSAMINE | | | |

[0180] These data suggest that Fortispore could help digest these compounds in the gut.

[0181] Fortispore was strongly positive for D-sorbitol, and starch Amidon and the other two competitor's strains (B30™ and Lactospore®) were negative or weakly positive for these.

TABLE 10
List of carbohydrates that are effectively fermented by B. Coagulans (Fortispore, BC30 ™, Lactospore ®) using API 50 Ch strips

| | B. | B. | | | B. | B. | |
|---|---|---|---|---|---|---|---|
| | coagulans | coagulans | B. | | coagulans | coagulans | B. |
| | 6086 | MTCC5856 | coagulans | | 6086 | MTCC5856 | coagulans |
| Carbohydrate | (BC30TM) | (Lactospore ®) | CGI1314 | Carbohydrate | (BC30TM) | (Lactospore ®) | CGI1314 |
| 1-ARABINOSE | + | + | + | AMYGDALIN | + | + | + |
| D-RIBOSE | + | + | + | ARBUTIN | + | + | + |
| D-XYLOSE | + | + | + | ESCULIN FERRIC CITRATE | + | + | + |
| D-GALACTOSE | + | + | + | SALICIN | + | + | + |
| D-GLUCOSE | + | + | + | D-CELLOBIOSE | + | + | + |
| D-FRUCTOSE | + | + | + | D-MALTOSE | + | + | + |
| D-MANNOSE | + | + | + | D-MELIBIOSE | + | + | − |
| L-RHAMNOSE | + | + | − | D-TREHALOSE | + | + | + |
| D-MANNITOL | − | + | + | AMIDON | (+) | − | + |
| D-SORBITOL | (+) | − | + | GENTIOBIOSE | + | + | + |
| METHYL-AD- | + | + | + | D-ARABITOL | − | (+) | (+) |
| GLUCOPYRANOSIDE | | | | | | | |
| N-ACETYLGLUCOSAMINE | + | + | + | POTTASIUM GLUCONATE | + | + | + |

[0182] These data suggest that Fortispore could help digest these compounds in the gut.

[0183] Fortispore has esterase, peptidase, phosphatase and glucosidase activity:

[0184] Fortispore was positive for esterase, peptidase, phosphatase, and galactosidase activity using API ZYM kit which implies:
[0185] a high possibility of Fortispore to generate free fatty acids from the action of esterase in the presence of an appropriate lipid source.
[0186] Galctosidase adds to the carbohydrate catabolism potential of Fortispore as these are active against various oligosaccharides, lactosylceramides, lactose, and numerous glycoproteins.
[0187] Aminopeptidases which catalyze the hydrolysis of leucine, valine and cysteine substrates.

[0188] Indeed, in silico analysis have identified genes encoding esterases, peptidases, and galactosidases.

TABLE 11
Enzymatic profile of Fortispore using API ZYM kit

| | | B. coagulans |
|---|---|---|
| | | CGI1314 (Fortispore) |
| Esterase activity | Esterase (C4:0) | + |
| | Esterase (C8:0) | + |
| Lipase activity | Lipase (C14:0) | − |
| Peptidase activity | Leucine arylamidase | + |
| | Valine arylamidase | + |
| | Cystine arylamidase | + |
| Proteinase activity | Trypsin | − |
| | α-chymotrypsin | − |
| Phosphatase activity | Acid phosphatase | + |
| | Alkaline phosphatase | + |
| | Phosphohydrolyase | + |
| Glycosidase activity | α-Galactosidase | + |
| | β-Galactosidase | + |
| | β-Glucuronidase | − |
| | α-Glucosidase | + |
| | β-Glucosidase | + |
| | β-Glucosaminidase | − |
| | α-Mannosidase | − |
| | α-Fucosidase | − |

[0189] This study confirms the hydrolytic abilities of Fortispore towards oligosaccharides and indicates the potential to break down fats and peptides to release free amino acids.

[0190] These data suggest that Fortispore could help digest these molecules in the gut.

[0191] B. coagulans enzymatic profile indicates peptidase and esterolytic capability and confirms oligosaccharide degradation capability:

[0192] All B. coagulans were positive for esterase, peptidase, phosphatase, and galactosidase activity using API ZYM kit which implies:
[0193] a high possibility of B. coagulans to generate free fatty acids from the action of esterase in the presence of an appropriate lipid source.
[0194] Galactosidase adds to the carbohydrate catabolism potential of B. coagulans as these are active against various oligosaccharides, lactosylceramides, lactose, and numerous glycoproteins.
[0195] Aminopeptidases which catalyze the hydrolysis of leucine, valine and cysteine substrates.

TABLE 12
Enzymatic profile of Fortispore using API ZYM kit

| | | B. coagulans | B. coagulans | B. coagulans |
|---|---|---|---|---|
| | | CGI1314 | MTCC5856 | 6086 |
| | | (Fortispore) | (Lactospore ®) | (BC30 ™) |
| Esterase activity | Esterase (C4:0) | + | + | + |
| | Esterase (C8:0) | + | + | + |
| Lipase activity | Lipase (C14:0) | − | − | − |
| Peptidase activity | Leucine arylamidase | + | + | + |
| | Valine arylamidase | + | + | + |
| | Cystine arylamidase | + | + | + |
| Proteinase activity | Trypsin | − | − | − |
| | α-chymotrypsin | − | − | − |
| Phosphatase activity | Acid phosphatase | + | + | + |
| | Alkaline phosphatase | + | + | + |
| | Phosphohydrolyase | + | + | + |
| Glycosidase activity | α-Galactosidase | + | + | + |
| | β-Galactosidase | + | + | + |
| | β-Glucuronidase | − | − | − |
| | α-Glucosidase | + | + | + |
| | β-Glucosidase | + | + | + |
| | β-Glucosaminidase | − | − | − |
| | α-Mannosidase | − | − | − |
| | α-Fucosidase | − | − | − |

[0196] This study demonstrates no differences in hydrolytic abilities of B. coagulans strains towards several enzymes using a commercial API ZYM Kits.

[0197] Fortispore releases free amino acids from glycolysis and protease metabolism

[0198] Metabolomic analysis reveals Fortispore fermentation and proteolytic capability towards milk carbohydrates and proteins generating a range of amino acids.

[0199] UHT Milk model was used to analyse the carbohydrate fermentation and proteolytic abilities of Fortispore. GC-MS analysis identified a total of 38 free amino acids (FAA) compounds, of which 10 were found to be statistically significant in Fortispore. A few of the carboxylic acids identified are associated with carbohydrate metabolism pathway, which confirms the presence of a Lactose/galactose/glucose uptake and enzymatic metabolism system to be active in Fortispore. Additionally, there is also evidence of an active proteolytic system in Fortispore as there is a release of a few amino acid linked with peptidase activity and benzoic acid which is linked with further catabolism of phenylalanine.

TABLE 13
Statistically significant compounds analysed with GC-MS using
the FAA method are listed along with potential precursors

| Compound | Potential peptidases/precursors |
|---|---|
| Alanine | Aminopeptidases PepN |
| Proline | Pep P/PepX |
| Methionine | MAP/PepM |
| Lysine | Aminopeptidases PepN |
| Tryptophan | Aminopeptidases |
| Succinic acid | Lactose/glucose |
| Lactic Acid | Lactose/glucose |
| Cis-Aconitic acid | Lactose/glucose |
| Isocitric acid | Lactose/glucose |

[0200] Overall, the enzymatic and metabolomic data suggest that Fortispore has active carbohydrate-metabolizing enzymes, as most of the compounds generated are those from the glycolysis pathway (conversion of carbohydrates in milk). Additionally, there is evidence of potentially active aminopeptidases, lyases and decarboxylases generating carboxylic acids and releasing amino acids from Fortispore fermented UHT milk.

[0201] Fortispore releases free amino acids from glycolysis and protease metabolism

### Free Amino Acid Analysis Presented in Bar Graphs (Mean+SEM)

[0202] FIG. 20 shows FAA profile of Fortispore UTH fermented milk. P-value≤0.005=** and P-value≤0.01=*. The white bar represents the control.

[0203] FIG. 21 shows FAA profile of Fortispore UTH fermented milk. P-value≤0.005=** and P-value≤0.01=*. The white bar represents the control.

[0204] Fortispore is slightly more efficient in producing compounds beneficial in skin health in comparison to competitor B. coagulans strains

[0205] Ganeden Biotech markets B. coagulans 6086 (BC30™) as an anti-aging probiotic,as it produces maximum amounts of naturally derived L+ lactic acid, bacteriocins, hydrogen peroxide, enzymes and other metabolites. Lactic acid is associated with anti-aging, fighting acne due to its antimicrobial activity and hydration. Succinic acid is also associated with anti-inflammatory, antimicrobial and hydration. Benzoic acid is associated with anti-microbial activity.

[0206] FIG. 22 compares Fortispore with Lactospore and BC30 in the production of lactic acid, succinic acid and Benzoic acid. Significance is indicated by a, b and/or c, multiple letters indicate results are not significantly different from more than one group (PC 0.05). Error bars present standard deviations.

[0207] Our results show Fortispore to be slightly more efficient than BC30™ in terms of lactic acid production and superior in succinic acid and benzoic acid production.

[0208] Fortispore can produce amino acids beneficial in skin health in comparison to competitor B. coagulans strains

[0209] Fortispore is compared with Lactospore® and BC30. Our results show Fortispore to be superior to BC30™ and Lactospore® in producing methionine, proline, lysine and tryptophan.

[0210] Methionine is a sulfur-containing amino acid that improves the tone and elasticity of the skin, promotes healthy hair and strengthens the nails. Proline helps lower inflammation, which promotes a healthy immune system. It also helps trigger a cascade of anti-inflammatory compounds and genes that help with recovery. Lysine is an essential amino acid with many benefits that range from preventing cold sores to reducing anxiety and promoting wound healing. Tryptophan is associated with relief from depression and anxiety.

[0211] FIG. 23 compares Fortispore with Lactospore and BC30 in the production of amino acids. Significance is indicated by a, b and/or c, multiple letters indicate results are not significantly different from more than one group (P<0.05). Error bars present standard deviations.

[0212] Fortispore proteomics analysis identifies proteins with potential probiotic benefits

[0213] Extracellular secretions of Fortispore were sent to mass spectrometry to identify proteins released by the probiotic strain. A total of 28 proteins were detected of which 6 had potential probiotic benefits.

TABLE 14
Fortispore proteomics identifies proteins
with potential probiotic benefits

| Protein of interest | Potential role |
|---|---|
| Hydrolase Nlp/P60 | Involved in degradation of proteins or fats |
| Serine protease | Involved in digestion of proteins - cleaves |
| | peptide bonds |
| Peptidase M23 | Involved in digestion of proteins |
| | Antimicrobial properties - lysis of bacterial |
| | cell wall |
| Chaperonin GroEL | Involved in protein folding |
| Peptidase | Involved in digestion of proteins |
| Dextransucrase | Involved in breakdown of starch and sucrose |

[0214] These data confirm previous in vitro results showing how Fortispore can help in digestion of proteins and carbohydrates and has antimicrobial properties against pathogens.

[0215] Fortispore growth increased in the presence of Fibersol® in minimal media.

[0216] FIG. 24 shows Fibersol® significantly increased the concentration (CFU/mL) of Fortispore by 1 log₁₀ in minimal media 24 hours post incubation compared to controls. *p<0.05

[0217] There is a significant increase in the growth of Fortispore in the presence of Fibersol® in minimal media in comparison to competitor B. coagulan strains.

[0218] FIG. 25 shows Fibersol® significantly increases the concentration (CFU/mL) of Fortispore in Minimal media whereas no significance in the growth of BC30 and Lactospore were seen. Statistical analysis conducted using one-way ANOVA using Tukey method. **p-value=<0.01.

[0219] There was no increase in the growth of Fortispore in the presence of Fibersol® in TSB media.

[0220] FIG. 26 shows that Fibersol® did not show significant increase in the concentration (CFU/mL) of Fortispore in TSB media compared to controls. Unlike minimal media, Fibersol® didn't increase the growth of Fortispore in rich media, likely because they reach maximum growth with the nutrients present in TSB media.

[0221] The growth of Fortispore, BC 30, DE111 and pathogens were compared in the presence of Fibersol® in TSB media.

[0222] FIG. 27 shows Fibersol® did not show significant increase in the concentration (CFU/mL) of DE111, Fortispore, BC30, E. coli and Salmonella enteritidis in TSB media compared to controls. Unlike minimal media, Fibersol® didn't increase the growth of DE111, Fortispore, BC30, E. coli and S. enteritidis in rich media, most likely because they reach maximum growth with the nutrients present in TSB media.

[0223] There was no increase in the growth of Fortispore in the presence of Fibersol® in 50% TSB media.

[0224] FIG. 28 shows Fibersol® did not significantly increase the concentration (CFU/mL) of Fortispore in 50% TSB media compared to controls.

[0225] The growth of Fortispore, BC 30 and DE111 was compared in the presence of Fibersol® in 50% TSB media.

[0226] FIG. 29 shows Fibersol® significantly increased the yield (CFU/mL) of DE111 by 1 log₁₀ after 24 hours in 50% TSB media. ****p<0.0001. Fibersol® did not show significant increase in the concentration (CFU/mL) of Fortispore and BC30 in 50% TSB media compared to controls.

[0227] No significant growth of Fortispore was observed in the presence of Fibersol® supplemented BHI media.

[0228] FIG. 30 shows that Fibersol® did not show significant increase in the concentration (CFU/mL) of Fortispore compared to controls in BHI media. Unlike minimal media, Fibersol® didn't increase the growth of Fortispore in rich media, most likely because they reach maximum growth with the nutrients present in BHI media.

[0229] The growth of Fortispore, BC 30 and DEl11 was compared in the presence of Fibersol® in BHI media.

[0230] FIG. 31 shows that Fibersol® did not show significant increase in the concentration (CFU/mL) of DE111, Fortispore and BC30 compared to controls in BHI media. Unlike minimal media, Fibersol® didn't increase the growth of DE111, Fortispore and BC30 in rich media, most likely because they reach maximum growth with the nutrients present in BHI media.

[0231] No increase in the growth of Fortispore was observed in the presence of Fibersol® in 50% BHI media.

[0232] FIG. 32 shows that Fibersol® did not show significant increase in the concentration (CFU/mL) of Fortispore compared to controls in 50% BHI media. Unlike minimal media, Fibersol® didn't increase the growth of Fortispore in rich media, most likely because they reach maximum growth with the nutrients present in BHI media.

[0233] No increase in the growth of Fortispore, BC 30 and DEl11 was observed in the presence of Fibersol® in 50% BHI media.

[0234] FIG. 33 shows that Fibersol® did not show significant increase in the concentration (CFU/mL) of DE111, Fortispore and BC30 compared to controls in 50% BHI media. Unlike minimal media, Fibersol® didn't increase the growth of DE111, Fortispore and BC30 in rich media, most likely because they reach maximum growth with the nutrients present in BHI media.

### Example 2

### Assess Adhesion Ability to an In Vitro Model of Intestinal Epithelium

[0235] Cell lines: Human Colorectal Adenocarcinoma Cell Line HT-29 and mucous-secreting cell line HT-29-MTX were propagated using low glucose DMEM medium supplemented with 10% Fetal Bovine Serum, 2 mM glutamine, 100 U/ml penicillin, 100 μg/l streptomycin, and 2 μg/ml amphotericin B in a 5% CO₂ atmosphere at 37° C.

[0236] Cells were seeded onto 24-well plates at a density 5×10⁵ cell/well and cultured for 21-28 days to complete maturation. Media was replaced every 2-3 days.

[0237] Prior to experiments cells were washed twice with 0.5 ml DPBS. DPBS was completely aspirated from the wells after the second round of washing.

[0238] Preparation of spores: Ten milligrams of B. clausii CSI08, B. megaterium MIT411 and B. coagulans CGI314 spores powders were weighted in 15 ml falcon tubes and resuspended in 10 ml of full culture medium without antibiotics. Suspensions were aliquoted and stored at −20° C. until use. Suspensions were used within 2 weeks upon preparation.

[0239] Adhesion assay: 500 μl of spores suspensions (1.3×10⁷-9.2×10⁷ CFU/ml) were added to HT-29 and HT-29-MTX cells, mixed by a gentle swirl, and incubated for 2.5 h at 37° C. in the CO₂ incubator. Control wells not containing mammalian cells were prepared and incubated in parallel in the same way (0.5 ml of spores' suspensions).

[0240] Upon incubation HT-29 and HT-29-MTX cells were washed 4 times with 0.5 ml PBS. After that 50 μl of Trypsin/EDTA solution and 50 μl of PBS were added to the wells and incubated for 10 min with gentle shaking (˜100 rpm) at 37° C. Fifty microliters of Trypsin/EDTA solution were added to control wells.

[0241] Consequently, 450 μl of PBS were added to the wells with spores, contents of the wells were transferred into Eppendorf tubes with scrapping and subjected to three rounds of vigorous shaking 30 sec each. Contents of control wells were transferred into Eppendorf tubes and subjected to one round of shaking.

[0242] Serial dilutions (plus dilutions of control wells) were prepared in PBS and plated onto BC agar (B. coagulans CGI314) or PetriFilm™ (B. clausii CSI08, B. megaterium MIT411). Plates were incubated at 37° C. for 48 h prior to counting, PetriFilm were incubated at 37° C. for 24 h prior to counting.

[0243] Experiments were performed two or three times with three technical replicates per experiment. The results are expressed as means±SEM.

TABLE 15
Adherence of B. clausii CSI08, B. megaterium MIT411 and
B. coagulans CGI314 spores to the HT-29-MTX cell line

| Percentage of | | | |
|---|---|---|---|
| adherence to HT-29- | B. clausii | B. megaterium | B. coagulans |
| MTX cell line | CSI08 | MIT411 | CGI314 |
| Mean | 12.10 | 20.68 | 19.68 |
| Standard error | 0.7710 | 3.005 | 2.197 |
| of the mean | | | |

TABLE 16
Adherence of B. clausii CSI08, B. megaterium MIT411
and B. coagulans CGI314 spores to the HT-29 cell line

| Percentage of | | | |
|---|---|---|---|
| adherence to HT-29 | B. clausii | B. megaterium | B. coagulans |
| cell line | CSI08 | MIT411 | CGI314 |
| Mean | 0.2578 | 1.499 | 0.8033 |
| Standard error | 0.02035 | 0.2983 | 0.1781 |
| of the mean | | | |

### Conclusion

[0244] 1. Results set out above demonstrate higher ability of spores to adhere to the mucous-secreting cell line HT-29-MTX compared to non-mucus secreting cells, possibly due to spores' physical properties.
[0245] 2. B. megaterium MIT411 and B. coagulans CGI314 spores have higher (but overall low) ability to adhere to non-mucus producing cell line HT-29 compared to B. clausii CSI08 spores.

### Example 3

### Evaluation of Bacillus coagulans CGI314 on Safety, Tolerance and Gastrointestinal Health: A Randomised, Double-Blind, Placebo-Controlled Trial in Healthy Adults

### Study Interventions

[0246] Probiotic 1 containing 1×10⁹ CFU of Bacillus coagulans CGI314 and Bacillus subtilis DE111® administered daily,
[0247] Probiotic combination containing about (and greater than) 0.5×10⁹ CFU of Bacillus subtilis DEl111, about 0.5×10⁹ CFU of Bacillus megaterium MIT411, about (and less than) 0.5×10⁹ CFU Bacillus coagulans CGI314, about 0.5×10⁹ CFU Bacillus clausii
[0248] CSI08; 2×10⁹ Bacillus spores total administered daily
[0249] Placebo: rice maltodextrin administered daily

### Indication Studied

[0250] Gastrointestinal homeostasis and immune system.

### Study Description

[0251] Healthy adults aged 18-65 years were recruited and screened for participation in the study. Eligible participants were randomized 1:1:1: to either one of the two experimental groups or control group and underwent 45 days of treatment and 2 weeks of follow-up to evaluate safety and efficacy of new probiotic strains in healthy adults.

[0252] For the purpose of this investigational products were packed in individual capsules, that corresponded to the daily dose. Each capsule contained 300 mg of ingredients:
[0253] Probiotic formula 1: Bacillus coagulans CGI314 and Bacillus subtilis DE11® (1×10⁹ CFU total), ˜4.17 mg; Low Moisture Rice Maltodextrin, 292.23 mg; Medium Chain Triglycerides, 3.6 mg.
[0254] Probiotic cocktail: 2×10⁹ CFU Bacillus spores, including Bacillus subtilis DE111® (about (and greater than) 0.5×10⁹ CFU), 2.1 mg; Bacillus megaterium MIT411 (about 0.5×10⁹ CFU), 2.1 mg; Bacillus clausii CSI08 (about 0.5×10⁹ CFU), 2.1 mg; Bacillus coagulans CGI314 (about (and less than) 0.5×10⁹ CFU), 2.1 mg; Low Moisture Rice Maltodextrin, 288 mg; Medium Chain Triglycerides, 3.6 mg.
[0255] Placebo consisted of all the same ingredients as investigational product only without probiotic organisms. Placebo was in individual capsules, that corresponded to the daily dose. Each capsule contained 300 mg of ingredients: Placebo: Low Moisture Rice Maltodextrin, 296.4 mg; Medium Chain Triglycerides, 3.6 mg.

[0256] Table 17 summarizes the change in scores of the Gut-brain axis questionnaire from baseline to the end of the treatment period, for the 4 probiotic groups and the placebo group. Mean changes with 95% confidence interval are shown. Results of the ANOVA omnibus test (p*-value) and one-sample T test (p-value) are also presented. Test of normality for the change in scores of the Gut-brain axis show that the data do not follow normal distribution, which could affect the results with borderline significance (p-values between 0.05 and 0.10). This affects two items: Loss of energy and Changes in appetite. An alternative nonparametric Kruskal Wallis test was applied to these items; p-values of 0.111 (Loss of energy) and 0.123 (Changes in appetite) were observed.

[0257] In general, mean values of the score changes of the Gut-brain axis questionnaire are negative for all the symptoms tested, meaning that the symptoms were less intense (participants were less bothered by these symptoms) at the end of the treatment period. One-sample T-test results show that in one third of tests (of 70 performed) a statistically significant change Gut-brain axis questionnaire score was observed. However, this can be observed for all treatment groups including the placebo group. Consequently, the results of the ANOVA test show, that no significant differences in Gut-brain axis score change among the treatment groups were detected, however a borderline significance for the items Loss of energy and Changes in appetite was observed. The participants in the Bacillus megaterium group experienced the largest change for these two items.

TABLE 17
Change in scores of the Gut-brain axis questionnaire items from
baseline to the end of the treatment period: Pairwise comparison
of probiotic groups with placebo (post hoc ANOVA: Dunnet t-test)

| | Bacillus | Probiotic |
|---|---|---|
| | coagulans | cocktail |
| | (N* = 25) | (N* = 25) |
| Sadnesschange | | |
| mean difference vs placebo | −0.42 (−1.00; | −0.44 (−1.02; |
| (95% CI) | 0.17) | 0.14) |
| p-value vs placebo | 0.236 | 0.192 |
| Irritationchange | | |
| Mean difference vs placebo | −0.33 (−0.94; | −0.35 (−0.95; |
| (95% CI) | 0.27) | 0.25) |
| p-value vs placebo | 0.453 | 0.405 |
| Loss of energychange | | |
| Mean difference vs placebo | 0.08 (−0.57; | −0.02 (−0.67; |
| (95% CI) | 0.74) | 0.63) |
| p-value vs placebo | 0.993 | 1.000 |
| Changes in apetitechange^{a} | | |
| Mean difference vs placebo | −0.33 (−1.01; | −0.04 (−0.54; |
| (95% CI) | 0.34) | 0.46) |
| p-value vs placebo | 0.390 | 0.999 |
| Hard to | | |
| breathe/chokingchange | | |
| Mean difference vs placebo | −0.21 (−0.61; | −0.16 (−0.56; |
| (95% CI) | 0.19) | 0.24) |
| p-value vs placebo | 0.505 | 0.709 |
| Heart | | |
| pounding/racingchange^{a} | | |
| Mean difference vs placebo | −0.33 (−0.92; | 0.08 (−0.35; |
| (95% CI) | 0.25) | 0.51) |
| p-value vs placebo | 0.176 | 0.968 |
| Sleeping problemschange | | |
| Mean difference vs placebo | −0.04 (−0.66; | −0.15 (−0.76; |
| (95% CI) | 0.57) | 0.46) |
| p-value vs placebo | 0.999 | 0.926 |
| Concentration | | |
| problemschange | | |
| Mean difference vs placebo | 0.13 (−0.42; | −0.02 (−0.56; |
| (95% CI) | 0.67) | 0.51) |
| p-value vs placebo | 0.944 | 1.000 |
| Nervousness/stresschange | | |
| Mean difference vs placebo | 0.00 (−0.71; | −0.14 (−0.85; |
| (95% CI) | 0.71) | 0.56) |
| p-value vs placebo | 1.000 | 0.963 |
| Angriness/tensionchange | | |
| Mean difference vs placebo | −0.04 (−0.63; | −0.35 (−0.93; |
| (95% CI) | 0.54) | 0.23) |
| p-value vs placebo | 0.999 | 0.372 |
| Headachechange | | |
| Mean difference vs placebo | −0.17 (−0.76; | −0.03 (−0.61; |
| (95% CI) | 0.42) | 0.55) |
| p-value vs placebo | 0.892 | 1.000 |
| Muscle aches/painchange | | |
| Mean difference vs placebo | 0.33 (−0.17; | 0.13 (−0.37; |
| (95% CI) | 0.84) | 0.63) |
| p-value vs placebo | 0.293 | 0.912 |
| Stiffnesschange | | |
| Mean difference vs placebo | 0.08 (−0.33; | 0.17 (−0.24; |
| (95% CI) | 0.50) | 0.58) |
| p-value vs placebo | 0.965 | 0.692 |
| Dizziness change | | |
| Mean difference vs placebo | −0.13 (−0.49; | 0.00 (−0.36; |
| (95% CI) | 0.24) | 0.36) |
| p-value vs placebo | 0.807 | 1.000 |

N* = number of participants included in the ITT population,
*p-value for Dunnet T-test (pairwise comparison)

[0258] Mean differences with 95% confidence intervals and p-values of pairwise comparison between individual probiotic group and placebo group are shown in Table 17. Compared to placebo, none of the study products containing probiotics showed a statistically significant difference in Gut-brain axis score change from baseline to the end of treatment period.

[0259] Mean differences with 95% confidence intervals and p-values of pairwise comparison between individual probiotic group and placebo group are shown in Table 18. Compared to placebo, none of the study products containing probiotics showed a statistically significant difference in the sum of Gut-brain axis items scores at baseline or at the end of treatment period.

TABLE 18
The sum of scores of the Gut-brain axis questionnaire items at baseline
and at the end of the treatment period: Pairwise comparison of probiotic
groups with placebo (post hoc ANOVA: Dunnet t-test)

| | Bacillus | Probiotic |
|---|---|---|
| | coagulans | cocktail |
| | (N* = 25) | (N* = 25) |
| Sum of Gut brain axis items | | |
| scores at baseline | | |
| Mean difference vs placebo | 0.43 (−3.86; | −0.02 (−4.30; |
| (95% CI) | 4.71) | 4.27) |
| p-value vs placebo | 0.997 | 1.000 |
| Sum of Gut-brain axis items | | |
| scores at the end of | | |
| the treatment period | | |
| Mean difference vs placebo | −1.00 (−4.62; | −1.34 (−4.92; |
| (95% CI) | 2.62) | 2.24) |
| p-value vs placebo | 0.899 | 0.762 |

N* = number of participants included in the ITT population,
*p-value for Dunnet T-test (pairwise comparison)

[0260] Mean differences with 95% confidence intervals and p-values of pairwise comparison between individual probiotic group and placebo group are shown in Table 19. Compared to placebo, none of the study products containing probiotics showed a statistically significant difference in HDL, LDL, TC or TG change from baseline to the end of treatment period.

TABLE 19
Cholesterol and triglyceride change from baseline to the end of
the treatment period in ITT population: Pairwise comparison of
probiotic groups with placebo (post hoc ANOVA: Dunnet t-test)

| | Bacillus | Probiotic |
|---|---|---|
| | coagulans | cocktail |
| | (N* = 25) | (N* = 25) |
| HDLchange [mmol/L] | | |
| mean difference vs placebo | 0.00 (−0.12; | 0.00 (−0.12; |
| (95% CI) | 0.11) | 0.11) |
| p-value vs placebo | 1.000 | 1.000 |
| LDLchange [mmol/L] | | |
| mean difference vs placebo | −0.05 (−0.34; | −0.08 (−0.37; |
| (95% CI) | 0.23) | 0.21) |
| p-value vs placebo | 0.972 | 0.888 |
| TCchange [mmol/L] | | |
| mean difference vs placebo | 0.01 (−0.41; | −0.01 (−0.43; |
| (95% CI) | 0.43) | 0.41) |
| p-value vs placebo | 1.000 | 1.000 |
| TGchange [mmol/L] | | |
| mean difference vs placebo | −0.17 (−0.62; | −0.03 (−0.48; |
| (95% CI) | 0.28) | 0.42) |
| p-value vs placebo | 0.762 | 0.999 |

N* = number of participants included in ITT population

[0261] Mean differences with 95% confidence intervals and p-values of pairwise comparison between individual probiotic group and placebo group are shown in Table 20. Compared to placebo, none of the study products containing probiotics showed a statistically significant difference in HDL, LDL, TC or TG relative change from baseline to the end of treatment period.

TABLE 20
Cholesterol and triglyceride relative change from baseline to the
end of the treatment period in ITT population: Pairwise comparison
of probiotic groups with placebo (post hoc ANOVA: Dunnet t-test)

| | Bacillus | Probiotic |
|---|---|---|
| | coagulans | cocktail |
| | (N* = 25) | (N* = 25) |
| HDL relative change [%] | | |
| mean difference vs placebo | −0.56 (−7.87; | −0.58 (−7.89; |
| (95% CI) | 6.76) | 6.74) |
| p-value vs placebo | 0.999 | 0.999 |
| LDLrelative change [%] | | |
| mean difference vs placebo | −2.45 (−12.19; | −4.37 (−14.12; |
| (95% CI) | 7.30) | 8.62) |
| p-value vs placebo | 0.926 | 0.632 |
| TCrelative change [%] | | |
| mean difference vs placebo | 0.87 (−6.37; | −0.40 (−7.64; |
| (95% CI) | 8.11) | 6.84) |
| p-value vs placebo | 0.995 | 1.000 |
| TGrelative change [%] | | |
| mean difference vs placebo | −5.70 (−35.29; | 6.40 (−23.18; |
| (95% CI) | 23.89) | 35.99) |
| p-value vs placebo | 0.970 | 0.955 |

N* = number of participants included in ITT population,
*p-value of Dunnet T-test (pairwise comparison)

[0262] Table 21 represents proportion of people who had reported at least one day with clinically relevant infection in Participant diary 1. In Table 22 descriptive statistics of number of days with clinically relevant infection and results of the Kruskal-Wallis test (p*-value) and Mann-Whitney U test with Holm's correction (p-value) are presented.

TABLE 21
Proportion of people with clinically relevant infection
reported in Participant diary 1 (N = 123)

| | Bacillus | Probiotic | |
|---|---|---|---|
| | coagulans | cocktail | Placebo |
| | (N* = 25) | (N* = 25) | (N* = 24) |
| Gastrointestinal | 0/25 (0.0) | 0/25 (0.0) | 2/24 (8.3) |
| infection (%) | | | |
| Respiratory tract | 1/25 (4.0) | 3/25 (12.0) | 6/24 (25.0) |
| infection (%) | | | |
| Urinary tract | 1/25 (4.0) | 2/25 (8.0) | 1/24 (4.2) |
| infection (%) | | | |

N* = number of participants included in the ITT population

TABLE 22
Number of days with clinically relevant infection
reported in Participant diary 1 (N = 123)

| | Bacillus | Probiotic | |
|---|---|---|---|
| | coagulans | cocktail | Placebo |
| | (N* = 25) | (N* = 25) | (N* = 24) |
| Gastrointestinal | 25 | 25 | 24 |
| infection | | | |
| (p* = 0.081) | | | |
| mean (SD): | 0.0 (NC): | 0.0 (NC): | 0.1 (0.4): |
| min-max | 0-0 | 0-0 | 0-2 |
| p-value vs placebo | 0.434 | 0.434 | / |
| Respiratory tract | 25 | 25 | 24 |
| infection | | | |
| (p* = 0.212) | | | |
| mean (SD): | 0.1 (0.6): | 0.6 (2.2): | 1.2 (2.4) |
| min-max | 0-3 | 0-11 | 0-8 |
| p-value vs placebo | 0.142 | 0.236 | / |
| Urinary tract | 25 | 25 | 24 |
| infection | | | |
| (p* = 0.754) | | | |
| mean (SD): | 0.1 (0.6): | 0.2 (0.6): | 0.2 (0.8): |
| min-max | 0-3 | 0-2 | 0-4 |
| p-value vs placebo | 1.000 | 1.000 | / |

N* = number of participants included in the ITT population,
NC = not calculable,
p* = p-value for Kruskal-Wallis test,
p = p-value for Mann-Whitney U test.

[0263] Kruskal-Wallis test did not show any significant differences in the number of days with clinically relevant infection treatment groups. However, a borderline statistically significant result was observed for clinically relevant gastrointestinal infection. This is probably due the fact that only no participants in the four probiotic treatment groups experienced clinically relevant gastrointestinal infection, while in probiotic group in total 2 days of such infection were observed, which could have happened by chance.

[0264] Nevertheless, compared to placebo, none of the study products containing probiotics showed a statistically significant difference.

[0265] Table 23 represents proportion of people who had reported at least one day with individual symptom of gastrointestinal infection in Participant diary 2. In Table 24 descriptive statistics of number of days with symptoms of gastrointestinal infection and results of the Kruskal-Wallis test (p*-value) and Mann-Whitney U test with Holm's correction (p-value) are presented.

TABLE 23
Proportion of people that had reported symptoms of gastrointestinal
infection in Participant diary 2 (N = 118)

| | Bacillus | Probiotic | |
|---|---|---|---|
| | coagulans | cocktail | Placebo |
| | (N* = 25) | (N* = 25) | (N* = 24) |
| Loss of appetite (%) | 0/24 (0.0) | 0/25 (0.0) | 1/23 (4.3) |
| Diarrhea (%) | 0/24 (0.0) | 0/25 (0.0) | 1/23 (4.3) |
| Constipation (%) | 0/24 (0.0) | 0/25 (0.0) | 3/23 (13.0) |
| Vomiting (%) | 0/24 (0.0) | 0/25 (0.0) | 1/23 (4.3) |
| Gases (%) | 0/24 (0.0) | 2/25 (8.0) | 2/23 (8.7) |
| Bowel sounds (%) | 0/24 (0.0) | 0/25 (0.0) | 0/23 (0.0) |
| Cramping/stomach | 1/24 (4.2) | 1/25 (4.0) | 2/23 (8.7) |
| pain (%) | | | |
| Bloating (%) | 1/24 (4.2) | 0/25 (0.0) | 1/23 (4.3) |

N* = number of participants included in the ITT population

TABLE 24
Number of days with symptoms of gastrointestinal infection
reported in Participant diary 2 (N = 118).

| | Bacillus | Probiotic | |
|---|---|---|---|
| | coagulans | cocktail | Placebo |
| | (N* = 25) | (N* = 25) | (N* = 24) |
| Loss of appetite | 24 | 25 | 23 |
| (p* = 0.389) | | | |
| mean (SD): | 0.0 (NC): | 0.0 (NC): | 0.0 (0.2): |
| min-max | 0-0 | 0-0 | 0-1 |
| p-value vs placebo | 0.921 | 1.000 | / |
| Diarrhea | 24 | 25 | 23 |
| (p* = 0.705) | | | |
| mean (SD): | 0.0 (NC): | 0.0 (NC): | 0.0 (0.2): |
| min-max | 0-0 | 0-0 | 0-1 |
| p-value vs placebo | 0.921 | 1.000 | / |
| Constipation | 24 | 25 | 23 |
| (p* = 0.013) | | | |
| mean (SD): | 0.0 (NC): | 0.0 (NC): | 0.4 (1.5): |
| min-max | 0-0 | 0-0 | 0-7 |
| p-value vs placebo | 0.212 | 0.260 | / |
| Vomiting | 24 | 25 | 23 |
| (p* = 0.389) | | | |
| mean (SD): | 0.0 (NC): | 0.0 (NC): | 0.0 (0.2): |
| min-max | 0-0 | 0-0 | 0-1 |
| p-value vs placebo | 0.921 | 1.000 | / |
| Gases | 24 | 25 | 23 |
| (p* = 0.660) | | | |
| mean (SD): | 0.0 (NC): | 0.1 (0.3): | 0.3 (1.3): |
| min-max | 0-0 | 0-1 | 0-6 |
| p-value vs placebo | 0.577 | 0.863 | / |
| Bowel sounds | 24 | 25 | 23 |
| (p* = 1.000) | | | |
| mean (SD): | 0.0 (NC): | 0.0 (NC): | 0.0 (NC): |
| min-max | 0-0 | 0-0 | 0-0 |
| p-value vs placebo | 1.000 | 1.000 | / |
| Cramping/stomach pain | 24 | 25 | 23 |
| (p* = 0.705) | | | |
| mean (SD): | 0.1(0.6): | 0.0 (0.2): | 0.2 (0.9): |
| min-max | 0-3 | 0-1 | 0-4 |
| p-value vs placebo | 1.000 | 1.000 | / |
| Bloating | 24 | 25 | 23 |
| (p* = 0.718) | | | |
| mean (SD): | 0.1 (0.6): | 0.0 (NC): | 0.6 (2.7): |
| min-max | 0-3 | 0-0 | 0-13 |
| p-value vs placebo | 1.000 | 1.000 | / |

N* = number of participants included in the ITT population,
NC = not calculable,
p* = p-value for Kruskal-Wallis test,
p = p-value for Mann-Whitney U test.

[0266] A significant difference among groups was detected only in the number of days with constipation (p*=0.013) probably due the fact that only three participants in Placebo group had reported this symptom in Participant diary 2, while in other four treatment groups none of the participants had reported this symptom. However, further analysis (Mann-Whitney U test with Holm's correction) where number of days with constipation was compared between individual probiotic group and placebo group did not show significant differences, probably due to low sample size.

### Efficacy Outcomes: Treatment Period

[0267] No significant differences in gastrointestinal health of the participants at baseline among the treatment groups were detected. Participants were randomized to 5 treatment group therefore such results were expected.

[0268] Scores of items in Gut-brain axis questionnaire were lower at the end of the treatment period compared to baseline scores, meaning that the participants were less bothered by these symptoms at the end of the treatment period. This can be observed for all treatment groups including the placebo group.

[0269] No significant differences in change (end of treatment period minus baseline) of Gut-brain axis item scores among the treatment groups were detected. Compared to placebo group, none of the study products containing probiotics showed a statistically significant difference Gut-brain axis score change.

[0270] No significant differences in improvement of Gut-brain axis item scores among the treatment groups were detected. Compared to placebo group, none of the study products containing probiotics showed a statistically significant difference Gut-brain axis score improvement.

[0271] No significant differences in sum of scores of all items in Gut brain axis questionnaire among treatment groups were detected. Compared to placebo, none of the study products containing probiotics showed a statistically significant difference in the sum of Gut-brain axis items scores at baseline or at the end of treatment period.

[0272] No significant differences in cholesterol and triglyceride changes (absolute and relative change from baseline to the end of the treatment period) among treatment groups were detected.

[0273] Compared to placebo, none of the study products containing probiotics showed a statistically significant difference in HDL, LDL, TC or TG change (absolute and relative) from baseline to the end of treatment period. The same findings were observed in the PP population.

[0274] Cytokine (TNFα, IFNα, IFNβ, IFNγ, and IL6) levels at the end of the treatment period were below the limit of quantification (LOQ) in all treatment groups. For cytokine IL13 some values above LOQ were reported, but no statistically significant difference between the treatment groups was observed.

[0275] No significant changes in heavy metals (Cadmium, Lead, Mercury, Copper, Nickel, Zinc, and Arsenic) levels at the end of the treatment period compared to the baseline values were detected in the Bacillus megaterium group. The same findings were observed in the PP population.

[0276] Compared to placebo, none of the study products containing probiotics showed a statistically significant difference in the number of days with symptoms of gastrointestinal infection. However, a borderline statistically significant result was observed for clinically relevant gastrointestinal infection. This is probably due the fact that only no participants in the four probiotic treatment groups experienced clinically relevant gastrointestinal infection, while in probiotic group in total 2 days of such infection were observed, which could have happened by chance.

[0277] Compared to placebo, none of the study products containing probiotics showed a statistically significant difference in the number of days with symptoms of respiratory tract infection. However, a statistically significant difference among treatment groups was detected in the number of days with runny nose—thick (p=0.018). probably due the fact that only three participants in Probiotic cocktail group have reported this symptom, while in other four treatment groups none of the participants have reported this symptom.

[0278] However, further post hoc analysis (pairwise comparison vs. placebo) did not show any significant differences.

[0279] Compared to placebo, none of the study products containing probiotics showed a statistically significant difference in the number of days with symptoms of urinary infection.

[0280] No statistically significant differences were detected among the treatment groups in stool regularity.

[0281] A significant difference among groups was detected for stool consistency, that is in the proportion of loose stools in the total treatment period as well as in weeks 6 and 7 of the treatment period. However, further post hoc analysis (pairwise comparison vs. placebo) did not show any significant differences, probably due to the low sample size. The participants in the Probiotic cocktail group had the smallest proportion of loose stool per all stools.

### Efficacy Outcomes: Follow-Up Period

[0282] A significant difference among groups was detected only in the number of days with constipation (p=0.013). However, further post hoc analysis (pairwise comparison vs. placebo) did not show any significant differences, probably due to low sample size.

[0283] None of the study products containing probiotics showed a statistically significant difference in the number of days with respiratory tract infection symptoms.

[0284] None of the study products containing probiotics showed a statistically significant difference in the number of days with urinary tract infection symptoms.

[0285] No significant differences were detected among the treatment groups in stool regularity and stool consistency.

### Safety Outcomes

[0286] In total 17 AEs were reported. Between 1 and 5 ADE were reported for each study product, most commonly gastroesophageal reflux (3 AEs), rash (2 AEs), and vertigo (2 AEs). No SAEs were reported.

[0287] Causality assessment revealed no relation between the reported AEs and the study products.

[0288] In summary, this study has addressed the safety and efficacy of new probiotics, namely Bacillus coagulans, Bacillus clausii, Bacillus megaterium and probiotic cocktail containing Bacillus subtilis, Bacillus megaterium, Bacillus clausii and Bacillus coagulans.

[0289] The gastrointestinal health of the participants at baseline among the treatment groups did not differ between the study groups, which was expected due to randomization.

[0290] The primary outcome of the study (safety) was achieved, as 17 AEs were reported in total with no SAEs. Causality assessment revealed no relation between the reported AEs and the study products.

[0291] None of the efficacy related outcomes showed any statistically significant difference, however this comes as no surprise due to small sample size per study group. Still, some trends favouring active products were observed, specifically in the Gut-brain axis scores and proportion of loose stools.

[0292] To conclude probiotic products showed to be safe to use in adults, and have shown some favourable trends regarding Gut-brain axis and stool consistency, however further studies with larger sample size, a run-in period to determine baseline stool consistency for each participant and use of validated questionnaires to determine the Gut-brain axis domains are needed in order to scientifically prove the efficacy of the studied products.

### REFERENCES

[0293] Abriouel, H., Franz, C., Omar, N., & Galvez, A. (2011). Diversity and applications of Bacillus bacteriocins. FEMS Microbiology Reviews, 35(1), 201-232. doi: doi.org/10.1111/j.1574-6976.2010.00244.x
[0294] Afrilasari W, Widanarni, Meryadini A (2016) “Effect of Probiotic Bacillus Megaterium PTB 1.4 on the Population of Intestinal Microflora, Digestive Enzyme Activity and the Growth of Catfish (Clarias Sp.).” HAYATI Journal of Biosciences, vol. 23, no. 4, pp. 168-172, doi:10.1016/j.hjb.2016.12.005.
[0295] Alippi, A. (1995). Detection of Bacillus larvae spores in Argentinian honeys by using a semi-selective medium. Microbiology SEM, 11, 343-350.
[0296] Alippi A, Reynaldi F, Lopez A, De Giusti M, Aguilar O (2004) “Molecular Epidemiology of Paenibacillus Larvae Larvae and Incidence of American Foulbrood in Argentinean Honeys from Buenos Aires Province.” Journal of Apicultural Research, vol. 43, no. 3 pp. 135-143, doi:10.1080/00218839.2004.11101124.
[0297] Baron, M. (2009). Original Research: A Patented Strain of Bacillus coagulans Increased Immune Response to Viral Challenge. Postgraduate Medicine, 121(2), 114-118. doi: 10.3810/pgm.2009.03.1971
[0298] Benno, Y., Suzuki, K., Suzuki, K., Narisawa, K., Bruce, W. R., & Mitsuoka, T. (1986). Comparison of the Fecal Microflora in Rural Japanese and Urban Canadians. Microbiology and Immunology, 30(6), 521-532. doi: 10.1111/j.1348-0421.1986.tb02978.x
[0299] Chan, Y. K., Estaki, M., & Gibson, D. L. (2013). Clinical Consequences of Diet-Induced Dysbiosis. Annals of Nutrition and Metabolism, 63(s2), 28-40. doi: 10.1159/000354902
[0300] Cutting, S. M. (2011). Bacillus probiotics. Food Microbiology, 28(2), 214-220. doi: 10.1016/j.fm.2010.03.007
[0301] Dolin, B. (2009). Effects of a propietary Bacillus coagulans preparation on symptoms of diarrhea-predominant irritable bowel syndrome. Methods and Findings in Experimental and Clinical Pharmacology, 31(10), 655. doi: 10.1358/mf.2009.31.10.1441078
[0302] Elshaghabee, F. M. F., Rokana, N., Gulhane, R. D., Sharma, C., & Panwar, H. (2017). Bacillus As Potential Probiotics: Status, Concerns, and Future Perspectives. Frontiers in Microbiology, 8. doi: 10.3389/fmicb.2017.01490
[0303] Endres, J., Clewell, A., Jade, K., Farber, T., Hauswirth, J., & Schauss, A. (2009). Safety assessment of a proprietary preparation of a novel Probiotic, Bacillus coagulans, as a food ingredient. Food and Chemical Toxicology, 47(6), 1231-1238. doi: 10.1016/j.fct.2009.02.018
[0304] Ferreira, C. M. H., Vilas-Boas, A., Sousa, C. A., Soares, H. M. V. M., & Soares, E. V. (2019). Comparison of five bacterial strains producing siderophores with ability to chelate iron under alkaline conditions. AMB Express, 9(1). doi: 10.1186/s13568-019-0796-3
[0305] Gabrielli, M., Lauritano, E. C., Scarpellini, E., Lupascu, A., Ojetti, V., Gasbarrini, G., . . . Gasbarrini, A. (2009). Bacillus clausii as a Treatment of Small Intestinal Bacterial Overgrowth. The American Journal of Gastroenterology, 104(5), 1327-1328. doi: 10.1038/ajg.2009.91
[0306] Gepner, Y., Hoffman, J. R., Shemesh, E., Stout, J. R., Church, D. D., Varanoske, A. N., . . . Ostfeld, I. (2017). Combined effect of Bacillus coagulans GBI-30, 6086 and HMB supplementation on muscle integrity and cytokine response during intense military training. Journal of Applied Physiology, 123(1), 11-18. doi: 10.1152/japplphysiol.01116.2016
[0307] Gilliam, Martha. (1979) “Microbiology Of Pollen And Bee Bread: The Genus Bacillus.” Apidologie, vol. 10, no. 3, pp. 269-274, doi:10.1051/apido:19790304.
[0308] Gilliam, Martha, and Diane K. Valentine. (1976) “Bacteria Isolated from the Intestinal Contents of Foraging Worker Honey Bees, Apis Mellifera: The Genus Bacillus.” Journal of Invertebrate Pathology, vol. 28, no. 2, pp. 275-276, doi:10.1016/0022-2011(76)90137-3.
[0309] Horosheva, T. V., Vodyanoy, V., & Sorokulova, I. (2014). Efficacy of Bacillus probiotics in prevention of antibiotic-associated diarrhoea: a randomized, double-blind, placebo-controlled clinical trial. JMM Case Reports, 1(3). doi: 10.1099/jmmcr.0.004036
[0310] Hun, L. (2009). Original Research: Bacillus coagulans Significantly Improved Abdominal Pain and Bloating in Patients with IBS. Postgraduate Medicine, 121(2), 119-124. doi: 10.3810/pgm.2009.03.1984
[0311] Hyronimus, B., Marrec, C. L., Sassi, A. H., & Deschamps, A. (2000). Acid and bile tolerance of spore-forming lactic acid bacteria. International Journal of Food Microbiology, 61(2-3), 193-197. doi: 10.1016/s0168-1605(00)00366-4
[0312] Ivanovics, G. & Alfoldi, L. (1957). Bacteriocinogenesis in Bacillus megaterium. J. gen. Microbiol. 16, 522
[0313] Jensen, G., Cash, H., Farmer, S., & Keller, D. (2017). Inactivated probiotic Bacillus coagulans GBI-30 induces complex immune activating, anti-inflammatory, and regenerative markers in vitro. Journal of Inflammation Research, Volume 10, 107-117. doi: 10.2147/jir.s141660
[0314] Kalman, D. S., Schwartz, H. I., Alvarez, P., Feldman, S., Pezzullo, J. C., & Krieger, D. R. (2009). A prospective, randomized, double-blind, placebo-controlled parallel-group dual site trial to evaluate the effects of a Bacillus coagulans-based product on functional intestinal gas symptoms. BMC Gastroenterology, 9(1). doi: 10.1186/1471-230x-9-85
[0315] Kawarizadeh, A., Nojoomi, F., Tabatabaei, M., Hosseinzadeh, S., & Farzaneh, M. (2019). The effect of Bacillus coagulans on cytotoxicity and apoptosis induced by Salmonella typhimurium in HT-29 cell culture. Iranian Journal of Microbiology. doi: 10.18502/ijm.v11i4.1468
[0316] Keller, D., Dinter, R. V., Cash, H., Farmer, S., & Venema, K. (2017). Bacillus coagulans GBI-30, 6086 increases plant protein digestion in a dynamic, computer-controlled in vitro model of the small intestine (TIM-1). Beneficial Microbes, 8(3), 491-496. doi: 10.3920/bm2016.0196
[0317] Khochamit, N., Siripornadulsil, S., Sukon, P., & Siripornadulsil, W. (2015). Antibacterial activity and genotypic-phenotypic characteristics of bacteriocin-producing Bacillus subtilis KKU213: Potential as a probiotic strain. Microbiological Research, 170, 36-50. doi: 10.1016/j.micres.2014.09.004
[0318] Kimmel, M., Keller, D., Farmer, S., & Warrino, D. (2010). A controlled clinical trial to evaluate the effect of GanedenBC30 on immunological markers. Methods and Findings in Experimental and Clinical Pharmacology, 32(2), 129. doi: 10.1358/mf.2010.32.2.1423881
[0319] Kotb, E. (2014). Purification and partial characterization of serine fibrinolytic enzyme from Bacillus megaterium KSK-07 isolated from kishk, a traditional Egyptian fermented food. Applied Biochemistry and Microbiology, 51(1), 34-43. doi:10.1134/s000368381501007x
[0320] Lakshmi, S. G., Jayanthi, N., Saravanan, M., & Ratna, M. S. (2017). Safety assessment of Bacillus clausii UBBC07, a spore forming probiotic. Toxicology Reports, 4, 62-71. doi: 10.1016/j.toxrep.2016.12.004
[0321] Liu, P., Xie, J., Liu, J., & Ouyang, J. (2019). A novel thermostable β-galactosidase from Bacillus coagulans with excellent hydrolysis ability for lactose in whey. Journal of Dairy Science, 102(11), 9740-9748. doi: 10.3168/jds.2019-16654
[0322] Marseglia, G. L., Tosca, M., Cirillo, I., Licari, A., Leone, M., Marseglia, A., . . . Ciprandi, G. (2007). Efficacy of Bacillus clausii spores in the prevention of recurrent respiratory infections in children: a pilot study. Therapeutics and Clinical Risk Management, 3(1), 13-17. doi: 10.2147/tcrm.2007.3.1.13
[0323] Mazzoli, A., Donadio, G., Lanzilli, M., Saggese, A., Guarino, A. M., Rivetti, M., . . . Isticato, R. (2019). Bacillus megaterium SF185 spores exert protective effects against oxidative stress in vivo and in vitro. Scientific Reports, 9(1). doi: 10.1038/s41598-019-48531-4
[0324] Neag, M. A., Catinean, A., Muntean, D. M., Pop, M. R., Bocsan, C. I., Botan, E. C., & Buzoianu, A. D. (2020). Probiotic Bacillus Spores Protect Against Acetaminophen Induced Acute Liver Injury in Rats. Nutrients, 12(3), 632. doi: 10.3390/nu12030632
[0325] Nista, E. C., Candelli, M., Cremonini, F., Cazzato, I. A., Zocco, M. A., Franceschi, F., . . . Gasbarrini, A. (2004). Bacillus clausii therapy to reduce side-effects of anti-Helicobacter pylori treatment: randomized, double-blind, placebo controlled trial. Alimentary Pharmacology and Therapeutics, 20(10), 1181-1188. doi: 10.1111/j.1365-2036.2004.02274.x
[0326] Nithya, V., & Halami, P. M. (2012). Evaluation of the probiotic characteristics of Bacillus species isolated from different food sources. Annals of Microbiology, 63(1), 129-137. doi:10.1007/s13213-012-0453-4
[0327] Padgham, J., and R. Sikora. (2007) “Biological Control Potential and Modes of Action of Bacillus megaterium against Meloidogyne Graminicola on Rice.” Crop Protection, vol. 26, no. 7, pp. 971-977, doi:10.1016/j.cropro.2006.09.004.
[0328] Pelletier, A. & Sygush, J (1990). Purification and characterization of three chitosanase activities from Bacillus megaterium P1. Appl Environ Microbiol 56, 844-848
[0329] Ripert, G., Racedo, S. M., Elie, A.-M., Jacquot, C., Bressollier, P., & Urdaci, M. C. (2016). Secreted Compounds of the Probiotic Bacillus clausii Strain O/C Inhibit the Cytotoxic Effects Induced by Clostridium difficile and Bacillus cereus Toxins. Antimicrobial Agents and Chemotherapy, 60(6), 3445-3454. doi: 10.1128/aac.02815-15
[0330] Rochín-Medina, J. J., Ramirez-Medina, H. K., Rangel-Peraza, J. G., Pineda-Hidalgo, K. V., & Iribe-Arellano, P. (2017). Use of whey as a culture medium for Bacillus clausii for the production of protein hydrolysates with antimicrobial and antioxidant activity. Food Science and Technology International, 24(1), 35-42. doi: 10.1177/1082013217724705
[0331] Salvetti, E., Orrh, L., Capozzi, V, Martina Am Lamontanara A, Keller D, Cash H, Felis G, Cattivelli L, Torriani S, Spano G. (2016) Integrate genome-based assessment of safety for probiotic strains: Bacillus coagulans GBI-30, 6086 as a case study. Appl Microbiol Biotechnol 100: 4595. https://doi.org/10.1007/s00253-016-7416-9
[0332] Scholle M D, White C A, Kunnimalaiyaan M, Vary P S (2003) “Sequencing and Characterization of pBM400 from Bacillus megaterium QM B1551.” Applied and Environmental Microbiology, vol. 69, no. 11, pp. 6888-6898, doi:10.1128/aem.69.11.6888-6898.2003.
[0333] Sharma, S., & Kanwar, S. S. (2017). Adherence potential of indigenous lactic acid bacterial isolates obtained from fermented foods of Western Himalayas to intestinal epithelial Caco-2 and HT-29 cell lines. Journal of Food Science and Technology, 54(11), 3504-3511. doi: 10.1007/s13197-017-2807-1
[0334] Snowdon, Jill A, and Dean O Cliver. (1996) “Microorganisms with Honey.” International Journal of Food Microbiology.
[0335] Sudha, M., Radkar, N., & Maurya, A. (2012). Effect of Supplementation of Probiotic Bacillus coagulans Unique IS-2 on Hypercholesterolemia Subjects: A Clinical Study. International Journal of Probiotics and Prebiotics, 6(2).
[0336] Sudha, M. R., Yelikar, K. A., & Deshpande, S. (2012). Clinical Study of Bacillus coagulans Unique IS-2 (ATCC PTA-11748) in the Treatment of Patients with Bacterial Vaginosis. Indian Journal of Microbiology, 52(3), 396-399. doi: 10.1007/s12088-011-0233-z
[0337] Sudha, M. R., Bhonagiri, S., & Kumar, M. A. (2013). Efficacy of Bacillus clausii strain UBBC-07 in the treatment of patients suffering from acute diarrhoea. Beneficial Microbes, 4(2), 211-216. doi: 10.3920/bm2012.0034
[0338] Sudha, M. R., Jayanthi, N., Aasin, M., Dhanashri, R., & Anirudh, T. (2018). Efficacy of Bacillus coagulans Unique IS2 in treatment of irritable bowel syndrome in children: a double blind, randomised placebo controlled study. Beneficial Microbes, 9(4), 563-572. doi: 10.3920/bm2017.0129
[0339] Sudha, M. R., Jayanthi, N., Pandey, D., & Verma, A. (2019). Bacillus clausii UBBC-07 reduces severity of diarrhoea in children under 5 years of age: a double blind placebo controlled study. Beneficial Microbes, 10(2), 149-154. doi: 10.3920/bm2018.0094
[0340] Sumathi C, Nandhini A, Padmanaban J (2017) “Antagonistic Activity of Probiotic Bacillus megaterium against Streptococcus mutans.” International Journal of Pharma and Bio Science, vol. 8, no. 1, doi:10.22376/ijpbs.2017.8.1.p270-274.
[0341] Thakur, K., Tomar, S. K., & De, S. (2016). Lactic acid bacteria as a cell factory for riboflavin production. Microbial Biotechnology, 9(4), 441-451. doi: 10.1111/1751-7915.12335
[0342] Tysset, C., Durand, C., and Taliergio, Y. P. (1970) Contribution to the study of the microbial contamination and the hygiene of commercial honey. Rec. Med. Vet. 146, 1471-1492.
[0343] Vary, P. S., Biedendieck, R., Fuerch, T., Meinhardt, F., Rohde, M., Deckwer, W., & Jahn, D. (2007). Bacillus megaterium—from simple soil bacterium to industrial protein production host. Applied Microbiology and Biotechnology, 76(5), 957-967. doi:10.1007/s00253-007-1089-3
[0344] von Tersch, M. A. and Carlton, B. C. (1983) Bacteriocin from Bacillus megaterium ATCC 19213: comparative studies with megacin A-216. Journal of Bacteriology 155, 866-871.

[0345] The invention is not limited to the embodiment described herein but can be amended or modified without departing from the scope of the present invention.

[0346] The use of the terms “a,” “an,” “the,” and similar referents in the context of describing the present invention (especially in the context of the claims) are to be construed to cover both the singular and the plural, unless otherwise indicated herein or clearly contradicted by context. Recitation of ranges of values herein are merely intended to serve as a shorthand method of referring individually to each separate value falling within the range, unless otherwise indicated herein, and each separate value is incorporated into the specification as if it were individually recited herein. Use of the term “about” is intended to describe values either above or below the stated value in a range of approximately ±10%; in other embodiments, the values may range in value above or below the stated value in a range of approximately ±5%; in other embodiments, the values may range in value above or below the stated value in a range of approximately ±2%; in other embodiments, the values may range in value above or below the stated value in a range of approximately ±1%. The preceding ranges are intended to be made clear by context, and no further limitation is implied. All methods described herein can be performed in any suitable order unless otherwise indicated here in or otherwise clearly contradicted by context. The use of any and all examples, or exemplary language (e.g., “such as”) provided herein, is intended merely to better illuminate the invention and does not pose a limitation on the scope of the invention unless otherwise stated. No language in the specification should be construed as indicating any non-claimed element as essential to the practice of the invention.

[0347] While in the foregoing specification this invention has been described in relation to certain embodiments thereof, and many details have been put forth for the purpose of illustration, it will be apparent to those skilled in the art that the invention is susceptible to additional embodiments and that certain of the details described herein can be varied considerably without departing from the basic principles of the invention.

[0348] All references cited herein are incorporated by reference in their entireties. The present invention may be embodied in other specific forms without departing from the spirit or essential attributes thereof, and, accordingly, reference should be made to the appended claims, rather than to the foregoing specification, as indicating the scope of the invention.

1. A Bacillus coagulans strain comprising a purified microbial population that comprises one or more bacteria with a gyrB that shares at least 97% identity with SEQ ID NO: 1; and/or that comprises one or more bacteria with a 16S rRNA that shares at least 97% identity with SEQ ID NO: 2.

2. The Bacillus coagulans strain of claim 1 that shares at least 97% identity with SEQ ID NO: 3.

3. The Bacillus coagulans strain of claim 1 wherein the purified microbial population comprises a bacterium with a 16S nucleic acid sequence comprising SEQ ID NO:2.

4. The Bacillus coagulans strain of claim 1 wherein the purified microbial population comprises a bacterium with gyrB nucleic acid sequence comprising SEQ ID NO: 1.

5. The Bacillus coagulans strain of claim 1 wherein the purified microbial population comprises a bacterium with a 16S nucleic acid sequence comprising SEQ ID NO: 2 and with a gyrB nucleic acid sequence comprising SEQ ID NO: 1.

6. A microbial composition comprising the Bacillus coagulans strain of claim 1 together with a comestibly acceptable carrier and/or diluent.

7. The microbial composition of claim 6, wherein a unit dose of the composition comprises 10⁶-10¹³ CFU of the Bacillus coagulans strain.

8. The microbial composition of claim 6, further comprising a mucous adherent excipient.

9. The microbial composition of claim 6, further comprising at least one further probiotic Bacillus spp. strain.

10. The microbial composition of claim 6, wherein the microbial composition is formulated as a tablet, a pill, a capsule, a powder, a solution, a suspension, or an emulsion.

11. The microbial composition of claim 6, wherein the microbial composition is formulated as a food.

12. (canceled)

13. A method of treating vaginal infections, urinary tract infections, gastrointestinal infections, gastrointestinal diseases, improving immune health, protection against oxidative stress, cleansing and detoxification, improving metabolic health or cardiovascular health, the method comprising the step of administering to a human subject the Bacillus coagulans strain of claim 1.

14. (canceled)

15. A method of treating vaginal infections, urinary tract infections, gastrointestinal infections, gastrointestinal diseases, improving immune health, protection against oxidative stress, cleansing and detoxification, improving metabolic health or cardiovascular health, the method comprising the step of administering to a human subject the microbial composition of claim 6.

16. A method of improving microbiome within a subject, comprising the step of administering to the subject a composition comprising a probiotic, wherein the probiotic comprises the Bacillus coagulans strain of claim 1.

17. (canceled)

18. (canceled)

The application's sequence listing, which the Patent Office published only in electronic form, follows.

SEQUENCE LISTING (3 sequences)

SEQ ID NO: 1 - DNA, 1926 bp, Bacillus coagulans
  source 1..1926: mol_type = genomic DNA
ttggaacaagaacaattacagaagcagtcttatggtgccgagcaaatccaggttcttgaagggctggaagcggtgcgcaaacgtccggggatgtatattggctcgacaagtgcgagaggccttcaccatcttgtctgggaaattgtggacaacagcattgacgaggcactggccggtttctgcgatgaaatcaatgtttttattgaaaaagacaacagcattacggtgaaggacaacgggcgcggcatcccggtcggcatccaggaaaaagtgggcaggcctgccgttgaagtcatcatgaccattttgcatgccggcgggaaatttggcggcggcggatataaggtgtccggcggcctgcacggggtcggcgcgtctgttgtgaacgccctgtctacagagctcgatgtctatgtccaccgcgacgggcatatttaccaccaaaaataccgccgcggtaaacctgcctttgacttaaaaatcattggcgaaacggaccgtaccggcacaacgacccacttcaagccggacccggaaatttttacggaaacgaccgaattcgactatgatattcttacaacccggctccgggaattggcttttttaaataaaggcatcaaaattaccattgaggataaacgcgaaaaaaatccgcgcaaacaagtataccattacgagggcgggatcaaatcgtacgtggagcatttgaaccgctcgaaagaagtgctccataaggaaccgatttatgtggaaggcgaaaaagacggcattacggttgaagtatcccttcaatacaatgacgggtttgccagcaatatctattcttttgccaataatatccacacctacgaaggcggcacacatgagtccggttttaaaacggctttaacgcgcgtcatcaatgattatgcccggaaaaacaatctgatcaaagaaaatgaagccaatttaacaggcgaagatgtccgggaagggctcactgcgatcgtttccatcaaacacccggatccacaatttgaagggcaaacgaaaacgaaacttggaaatacagaagcaagaacgattacagatgcggtattttccgaggcgttcgagaagtttatgatggaaaatcctcaagtggcgcggaaaattgtcgaaaaagggctgatggctgcccgggcaaggatggctgcgaaaaaagcacgcgaactgacacggagaaaaagcgcgctcgaatcgacaagcctgccgggcaaacttgcagactgcacatcacgcgacccgtctgagagcgagctctacattgttgaaggtgactcggccggcggctctgccaagcagggaagggaccggatgttccaggcgatcctgccgttaagagggaaaattttaaacgtagagaaagcgcgtttggataaaattttgtcaaatgcggaaatccgtaccattattaccgcgctcggcacaggtgtcggggaagattttgacatctcgaaggcgcgttatcataaagtcgtgatcatgacggatgcggatgtcgacggcgcccatatccgcacgttattattaacgtttttctaccgttatatgcgcccgttaatcgatgcaggctatatttatatcgcccagccgccgctttataaagtgcagcagggcaaaaaggttgaatatgtatacagcgaccgcggccttgaggagttgcttaatacgctgcctgcccagccgaagccggccatccagcgttataaaggcctcggtgaaatgaatccggaacagctttgggagacgacgatggaacctgctaaccggacgatgctgcaagtgagcctcgatgatgcgattgaagcggacggcacgtttgaaatgttgatgggtgataaagtggaaccgcggcggaattttatcgaagaaaatgccatttacgtgaaaaacctggacatttaa

SEQ ID NO: 2 - DNA, 1298 bp, Bacillus coagulans
  source 1..1298: mol_type = genomic DNA
ttagctagttggcggggtaacggcccaccaaggcaacgatgcgtagccgacctgagagggtgatcggccacattgggactgagacacggcccaaactcctacgggaggcagcagtagggaatcttccgcaatggacgaaagtctgacggagcaacgccgcgtgagtgaagaaggccttcgggtcgtaaaactctgttgccggggaagaacaagtgccgttcgaacagggcggcgccttgacggtacccggccagaaagccacggctaactacgtgccagcagccgcggtaatacgtaggtggcaagcgttgtccggaattattgggcgtaaagcgcgcgcaggcggcttcttaagtctgatgtgaaatcttgcggctcaaccgcaagcggtcattggaaactgggaggcttgagtgcagaagaggagagtggaattccacgtgtagcggtgaaatgcgtagagatgtggaggaacaccagtggcgaaggcggctctctggtctgtaactgacgctgaggcgcgaaagcgtggggagcaaacaggattagataccctggtagtccacgccgtaaacgatgagtgctaagtgttagagggtttccgccctttagtgctgcagctaacgcattaagcactccgcctggggagtacggccgcaaggctgaaactcaaaggaattgacgggggcccgcacaagcggtggagcatgtggtttaattcgaagcaacgcgaagaaccttaccaggtcttgacatcctctgacctccctggagacagggccttccccttcgggggacagagtgacaggtggtgcatggttgtcgtcagctcgtgtcgtgagatgttgggttaagtcccgcaacgagcgcaacccttgaccttagttgccagcattgagttgggcactctaaggtgactgccggtgacaaaccggaggaaggtggggatgacgtcaaatcatcatgccccttatgacctgggctacacacgtgctacaatggatggtacaaagggctgcgagaccgcgaggttaagccaatcccagaaaaccattcccagttcggattgcaggctgcaacccgcctgcatgaagccggaatcgctagtaatcgcggatcagcatgccgcggtgaatacgttcccgggccttgtacacaccgcccgtcacaccacgagagtttgtaacacccgaagtcggtgaggtaacctttacggagccagccgccgaaggtgggacagatgattggggtgaagtcgtaacaaggtagccgtatcggaaggtgcggctggatcacct

SEQ ID NO: 3 - DNA, 3037825 bp, Bacillus coagulans (residues 1-1,518,913 of 3,037,825)
  misc_difference 6889..6988: note = n is a, c, g, t or u
  misc_difference 47467..47566: note = n is a, c, g, t or u
  misc_difference 61054..61153: note = n is a, c, g, t or u
  misc_difference 76272..76371: note = n is a, c, g, t or u
  misc_difference 82985..83084: note = n is a, c, g, t or u
  misc_difference 151512..151611: note = n is a, c, g, t or u
  misc_difference 172312..172411: note = n is a, c, g, t or u
  misc_difference 197425..197524: note = n is a, c, g, t or u
  misc_difference 227463..227562: note = n is a, c, g, t or u
  misc_difference 307213..307312: note = n is a, c, g, t or u
  misc_difference 322214..322313: note = n is a, c, g, t or u
  misc_difference 410874..410973: note = n is a, c, g, t or u
  misc_difference 432862..432961: note = n is a, c, g, t or u
  misc_difference 467951..468050: note = n is a, c, g, t or u
  misc_difference 477885..477984: note = n is a, c, g, t or u
  misc_difference 489928..490027: note = n is a, c, g, t or u
  misc_difference 492311..492410: note = n is a, c, g, t or u
  misc_difference 495640..495739: note = n is a, c, g, t or u
  misc_difference 500911..501010: note = n is a, c, g, t or u
  misc_difference 501564..501663: note = n is a, c, g, t or u
  misc_difference 501837..501936: note = n is a, c, g, t or u
  misc_difference 505086..505185: note = n is a, c, g, t or u
  misc_difference 527873..527972: note = n is a, c, g, t or u
  misc_difference 530643..530742: note = n is a, c, g, t or u
  misc_difference 567235..567334: note = n is a, c, g, t or u
  misc_difference 586317..586416: note = n is a, c, g, t or u
  misc_difference 605673..605772: note = n is a, c, g, t or u
  misc_difference 629225..629324: note = n is a, c, g, t or u
  misc_difference 657578..657677: note = n is a, c, g, t or u
  misc_difference 717390..717489: note = n is a, c, g, t or u
  misc_difference 730327..730426: note = n is a, c, g, t or u
  misc_difference 770161..770260: note = n is a, c, g, t or u
  misc_difference 795667..795766: note = n is a, c, g, t or u
  misc_difference 805480..805579: note = n is a, c, g, t or u
  misc_difference 870294..870393: note = n is a, c, g, t or u
  misc_difference 922059..922158: note = n is a, c, g, t or u
  misc_difference 936419..936518: note = n is a, c, g, t or u
  misc_difference 949603..949702: note = n is a, c, g, t or u
  misc_difference 1002031..1002130: note = n is a, c, g, t or u
  misc_difference 1002727..1002826: note = n is a, c, g, t or u
  misc_difference 1054247..1054346: note = n is a, c, g, t or u
  misc_difference 1136430..1136529: note = n is a, c, g, t or u
  misc_difference 1167917..1168016: note = n is a, c, g, t or u
  misc_difference 1173346..1173445: note = n is a, c, g, t or u
  misc_difference 1214137..1214236: note = n is a, c, g, t or u
  misc_difference 1226595..1226694: note = n is a, c, g, t or u
  misc_difference 1236944..1237043: note = n is a, c, g, t or u
  misc_difference 1306297..1306396: note = n is a, c, g, t or u
  misc_difference 1334053..1334152: note = n is a, c, g, t or u
  misc_difference 1366476..1366575: note = n is a, c, g, t or u
  misc_difference 1376091..1376190: note = n is a, c, g, t or u
  misc_difference 1410061..1410160: note = n is a, c, g, t or u
  misc_difference 1459974..1460073: note = n is a, c, g, t or u
  misc_difference 1467508..1467607: note = n is a, c, g, t or u
  misc_difference 1519137..1519236: note = n is a, c, g, t or u
  misc_difference 1520213..1520312: note = n is a, c, g, t or u
  misc_difference 1602768..1602867: note = n is a, c, g, t or u
  misc_difference 1608992..1609091: note = n is a, c, g, t or u
  misc_difference 1617923..1618022: note = n is a, c, g, t or u
  misc_difference 1619560..1619659: note = n is a, c, g, t or u
  misc_difference 1642073..1642172: note = n is a, c, g, t or u
  misc_difference 1686939..1687038: note = n is a, c, g, t or u
  misc_difference 1730483..1730582: note = n is a, c, g, t or u
  misc_difference 1757990..1758089: note = n is a, c, g, t or u
  misc_difference 1781447..1781546: note = n is a, c, g, t or u
  misc_difference 1808695..1808794: note = n is a, c, g, t or u
  misc_difference 1855832..1855931: note = n is a, c, g, t or u
  misc_difference 1923516..1923615: note = n is a, c, g, t or u
  misc_difference 1948888..1948987: note = n is a, c, g, t or u
  misc_difference 2020632..2020731: note = n is a, c, g, t or u
  misc_difference 2025854..2025953: note = n is a, c, g, t or u
  misc_difference 2068060..2068159: note = n is a, c, g, t or u
  misc_difference 2084469..2084568: note = n is a, c, g, t or u
  misc_difference 2114719..2114818: note = n is a, c, g, t or u
  misc_difference 2126824..2126923: note = n is a, c, g, t or u
  misc_difference 2187352..2187451: note = n is a, c, g, t or u
  misc_difference 2228980..2229079: note = n is a, c, g, t or u
  misc_difference 2440221..2440320: note = n is a, c, g, t or u
  misc_difference 2443328..2443427: note = n is a, c, g, t or u
  misc_difference 2460637..2460736: note = n is a, c, g, t or u
  misc_difference 2484389..2484488: note = n is a, c, g, t or u
  misc_difference 2516462..2516561: note = n is a, c, g, t or u
  misc_difference 2523992..2524091: note = n is a, c, g, t or u
  misc_difference 2613846..2613945: note = n is a, c, g, t or u
  misc_difference 2621437..2621536: note = n is a, c, g, t or u
  misc_difference 2688754..2688853: note = n is a, c, g, t or u
  misc_difference 2701926..2702025: map = n is a, c, g, t or u
  misc_difference 2799919..2800018: note = n is a, c, g, t or u
  misc_difference 2822278..2822377: note = n is a, c, g, t or u
  misc_difference 2961317..2961326: note = n is a, c, g, t or u
  misc_difference 2962604..2962613: note = n is a, c, g, t or u
  misc_difference 2963654..2963663: note = n is a, c, g, t or u
  misc_difference 2964755..2964764: note = n is a, c, g, t or u
  misc_difference 2965962..2965971: note = n is a, c, g, t or u
  misc_difference 2977651..2977660: note = n is a, c, g, t or u
  misc_difference 2978662..2978671: note = n is a, c, g, t or u
  misc_difference 2981477..2981486: note = n is a, c, g, t or u
  misc_difference 2983142..2983151: note = n is a, c, g, t or u
  misc_difference 2984853..2984862: note = n is a, c, g, t or u
  misc_difference 2988372..2988381: note = n is a, c, g, t or u
  misc_difference 2989238..2989247: note = n is a, c, g, t or u
  misc_difference 2991592..2991601: note = n is a, c, g, t or u
  misc_difference 2992391..2992400: note = n is a, c, g, t or u
  misc_difference 2993038..2993047: note = n is a, c, g, t or u
  misc_difference 2993984..2993993: note = n is a, c, g, t or u
  misc_difference 2995000..2995009: note = n is a, c, g, t or u
  misc_difference 2999222..2999231: note = n is a, c, g, t or u
  misc_difference 3001588..3001597: note = n is a, c, g, t or u
  misc_difference 3002134..3002143: note = n is a, c, g, t or u
  misc_difference 3002692..3002701: note = n is a, c, g, t or u
  misc_difference 3003589..3003598: note = n is a, c, g, t or u
  misc_difference 3004241..3004250: note = n is a, c, g, t or u
  misc_difference 3005042..3005051: note = n is a, c, g, t or u
  misc_difference 3005588..3005597: note = n is a, c, g, t or u
  misc_difference 3007905..3007914: note = n is a, c, g, t or u
  misc_difference 3025703..3025712: note = n is a, c, g, t or u
  misc_difference 3026358..3026367: note = n is a, c, g, t or u
  misc_difference 3028152..3028161: note = n is a, c, g, t or u
  misc_difference 3032565..3032574: note = n is a, c, g, t or u
  misc_difference 3034721..3034730: note = n is a, c, g, t or u
  misc_difference 3035952..3035961: note = n is a, c, g, t or u
  misc_difference 3037119..3037128: note = n is a, c, g, t or u
  source 1..3037825: mol_type = genomic DNA
ttcgttcagcaagccctaaggtagttgagaattcgccattacgtgtccggggaacttttaatgtaacattgccgatgctcatcaacagctcgcgttcatagtaaccgttccggtaatcccggcgttcaacagcgcgttcataagggctcgtttttaaatagtcatccctttccttttccataaactcgtttaacacgaggacaaccgctgatttaattaccgcgtcaagatcggaagtcatgatggcttcttttaaaacatccaaatttaggttaaactgtaagtgagtcattttatctcctcttttcattgtttattgttgttgaaaacagtgttgccaagagttgataaaatgattccttctttttacacaattatacggacttaatcttttttaagtattttagaacacgcaaatattcatctaattcattgaccatatggttaataaaactgggcgtcaaatgaatggtgattttcccggtcaactgttttctgatgatcgaaagtttcaactgccttaattgcaatgcttcttcatccgctctttggcttaagcggatgagatcggcattttgtatacttctaagcagttgatcaaagacttgaataaaataacgcgtttgttcaatttcttgtttttcctgcggagcgagtgaatcatgaataaaacgtgcgtgatctcccaatatttgaagccagaagccatgttcaaatcctgctgcctgttcaaaatttgccatccggcattctctcctttcgtgcactcttatcatcttatggatgcctgacggggattatgatggatgcctgacggggattatgatgggtgcctgacagacgccagacataaaaaaatccccgcctaattgatgcaggtagggattggtctttcaatatcgccattgttttggccatcatggttattccggagcttaaattcgtttaatgcttcaattgaaaactccggaaaaattgattccggcatgcttgacggattgggcatgtttcttttttaactccagcgccttttccgggtagtccgtgataatacctgccagcttcaggtccagagcttttttaatggaacgggcggaattcactgtccaaacacgtaccggaaccgaatgttttgtcgtaaatagattggatttgctgattaaaaacgaccggttcaggtgtagtccggacagctggtgatcttgaatcatacgctctaaatccaaatggcgcttcgatgtcaaaaaagcagtatgtgcctccgggtctaatgtttttatccttatcagtgttgaaagattaaaagatgaaaaaatgattcttgattttaaatggtacctttccgagagctccaaggcctttttttcgatgccggggtaggaaaacgtatctgtcttcagctcaatgttcaaggaaacctggtaatccgctgtcagttccagcacttcctcaagggtggggaccgtttccttctcccaggatgaatcataaaaagagagatgtttgaatttcttgctggcgctgtattgtttgatttcgttcaaatttaaatctttcacataaccgctgcctgtagtcgttctgtcgagtttctcatcatggatcaccaccagttcgccgtcttttgacatgtggacatccagttctaagccttccgctccgatgtgacaggcatgggcaaaacccagcaatgtattttccggatgggttcccttgctgccgcggtgcccgaatatcagtgtttctcccataagcgcattcctccggttatcattttccgtttgcctggttggctttttcaatggcctggttggtttgttctacagctttattcagggctttgtcaatgtcttcgccgttatagacactttccatggccgattccacagcggttctttcttccgacaggctttgcatcagcgcgccctgtgtgaccggcgaagtatgggtggcttgtaattgctgcaccggaacttgcaactgcggcactttttgataagcttcttttacaagctggtcatcgtatgctttcgtgttaatggcaaaatagccggtgcctatgtgccattcagcctgtacgtgagggcttgccaaatatttcatgaaatcccatgccgctttttgttcggcgctgctttttccttttgacagccacaggcttgcaccgccgatggcaaccccgttccattttttgctttccggatgcggcagataagctacaccgactttaaattttgcgttatcgacaacgtcccggatgctggcggacgattggatgaacatggccactttgcctgcaagaaatcccgctgtcatatcatcagccgcattcgtgcccgtgccgtaatcgacaaaagttttgtctgcaatcatgtttttcgcccacttgagaatgttttttcccgcttcgttattgaacacggactttgtcggcgttccgtcatgtccgttgtttttattgaccagtagtgaaccttgattggccagcaattcttcaaaaagccaaccatacggctgcagggcaaagcctttcatttttccattgctggagtctgttactttttttgcatatgcttcaatctgttcaaaagtgacatttttcggatcgatgttgacgccggcttttttaagggcatcctcgttgtaatacaggacaggtgtggaggaattaaacggcatagaatatagttttccgtccaccgtataataatttaaaatattcttttccaagttcgaagtatcatagtgatctttgtcaatgaatttttggacaggatcaataaagccgctgttgatcattgtcttggtcccgatttcctgaacctggatgatggtaggggctttatccgtaccgccgacacttaagtattttggcagggattccgtgtattccccctggtattccgtttttacgagcactttattctgtgactggttgtattctttcacaatttgattgagcgttttttgcggctctccgctcatggaatgccaaaacgtcaccacgatgcggccgttttgtttcgtggtggtcgcctctgtatttgcgccacaggcagcaaggcttaaggtaaggcaaagcatcataaaaattgcaaggtattttttaatcattttgcatcctccttcaataaagttaagttttctcttgaatactcactcattctcaaaatttcataggtgtttaatttacaccaaatagctatcacatcttcaaacgaatttatgcagaatattattataggttatggaccatcctaacgaccgaactggataagtttggtaaataaaaggatataaccgtgcgtaagatctccacacgactcaagatcgctcaccctcctatatctctccggatcagggtccatacattcctcctattttatcgagccttcggtgaggcctttttgcaaatgtttttgacccgcaaataagacgagtaaagtcgggatcgcgacagtgaccgcacatgccatgatcatgccccagtcgttcagcgtttcctgggattgcatttgtttgagcccgatctgcacggtgcgggctgtatcattggttgtgaccagaatcggccataaatactgattccacgtcgtcaaaaagctgtaagtacctaacgtaacaaggctgatcttcgacatcggcagcacaactttcagataaaatttccaatggctaatgcccatcaggtcgcttgcttcttttaactccattggaatttgtttgaaatgctgcctgagtaaaaacgttccaaatgcggaagcgataaacggcaggatgagtgcaggatacgtattcagccagcccagatcccgtatcgtctcaaaattggggatcatctgcgcctcaaacggaaccatcatcgtggaaataaacaagtaaaacagcagattttgccctttgaattttggaaacacaaacgcatatgcagcaaggctcgacagcagcagctgcccggccgtgacagccaatgaaacaagaacactgttcatcagataatggacgaaagtcgtgttttgaaaggcttcaagataatggtttaaactgatatgcactgaaaaataatgtccggctacaatctcttcctgcggtatgaggctgatggacaggccgagcaaaaacgggctgccaatcaaaagcgcaaagaagattaaaacagcgtacaggccggtcttcgagacaaacgttctcatcattggtaatgcaccttcttttcccccgccttaaattggatgatcgttaagacaaagatgatgacagctaatataaccgcttcggcactggaggtaccaaactggtggttgataaaggcatcctggtaaatggaatacacgagcaaatttgtgtgatttgacgggccgccctttgtgagcatgtcaatctgcccgaatgtttggaaggcattgatcacagaaacgatgatgacaaaaaacaatgtcggcgataacagcgggagtgtaatccgcctgacctgcgtgagatacggaatccccgtaatttgcgcactttcataaaggttttggtcaatgtgttgcaagcctcccaacaggattaaaaaagaaaagccagtgttcatccacacggtggacagcgaaatggaaaacaacgcccaatgcgggtcggttaaccagctgaccgcaggaaggtgaaagagctgcatcaaacggttcatcagtccgatggaaggattaaataaaaacatccaaaaaacggaagccacggagacgctgatccccattgttgatgcgaaaatggttctgaaaaagccgattccttttaatttttcattggcgagcaaagcgagaaaaagcgaaatgatcacggttgccgcaactgttcccgcagcaaacatcagcgtgtacagcaaactttgtctgtagtctgcggatgtgaacagttctttaaaattgctgagtccggcgaacacggttggatgcccggcaaaatcggtcagataaaaactgagaaataccgtccggaacatcgggtaaaaaatgaaaacggccaacaaaatgagggatggaagcagaaacagccatccggtcacagcatccctgtatcgcctctttgtcttcttctcctgttccaattggacattgatcgcttctccagcagataaattttgtatcataccgaaaccccgcctttttccatattgaaggccttttcgcgcgtatccggatcaaaaaaatggacatcctccggagagaagtagaccgttatccggtcatccggatcaagctgccattgtccggcccattttgctttccactgtgtatttccgaacgcaaaccaaataatcgttttgtcgccaagttgttcggcggacttgacggttgcctgtattgcagcgtcgccgctcttggcattcggtttaaaatgctcaggccggatgccaaggatgcatgttggtttgggaaaagagaatcctggctgaacggccggaccgtccggaatcctgaaacgtttttcctcttcaacatacgcttctgtgaaattcatttgcggcgatccgataaaagaagcagcgaattgatttgccggatcattgtagatttcgatcggctctcctatttgctggatccttccttcattcaagatcatgatccggtctcccatcgtcatcgcttccacctggtcgtgggtaacgtaaatcatcgttaacccgagctggcgctgcagttgccggatttccgcccgcatctcggtgcggagtttcgcatccaaattcgagagcggctcatccattaaacaaatcggcgcctgactgacaatcgcccttgccaatgcaaccctttgccgctggcccccagataaagcgcgcggttttttttcggcaaatggctccagttggacaagtgccagtgcatgtttaagccgcgcttctttttcctgcttggtgagtttttctttcgagttaatgccaaaaaggatattttcccttaccgtcatgtgcggataaagggcgtaattctgaaataccatcgacacttggcggtctttcggcaaaacatagtttgccggccggttgtcaatatagagctggccgcctgaaatgtcttcaagcccggcaatcatccgcaaaatcgtgctcttcccgcatcctgaagggccgacaagcacaaaaaattctccttgctcaaccgaaaagtgaatgtcacttaaaacagttgcgcctttcccgtaagacttcgaaacattgaccatctcgattttcggcacgaagctttcctccttacttatcaatttgcaaattcaagatagcacaaaaaaaatcgcaaaactgcgatttcaaaggaacttaacttaatatttacaaaatctttaagggaaatgattttgacgtttttgatggtgctgggggaaaggcttgtaatataagaaagcgcagaggttttggcccctgcgcttcttgaatcgttacacgctttttgctatttcacttttactgtccgatatccgctaatattgccggatttatccgcggcctcactttaatcgtggtgccttttttcgttgggctgatttggattttataatatccgcgcttgtcggctttggcagagccgatttttttgctgcttgcataagcagtaacggttacgtatgcttctcaatgatgtacttggaagtgtggctgaccgcgtaaacagacggtgtgcctggtgcgattctgtcaatcgccgttacactttttgtgctgctggatccgtagctgtttttcgcgtaattataaattttcgtgccggctttgtgcttcggaatcttgactttatattcgcctttactgttgcttgtgcttttatacgttttcgatccgattttcacatatacggtacttgatttgcttgttttcccgctaacataagcagctctgaggagtaaaaannnnnnnnnnnnnnnnnnnnnnnnnnnnnnnnnnnnnnnnnnnnnnnnnnnnnnnnnnnnnnnnnnnnnnnnnnnnnnnnnnnnnnnnnnnnnnnnnnnngtttgatctacttctttgcgaatatggccatagctttttttaagatttcgttttcctctttcagccggtgcaattctttttgcaggttcagaaattcttccggggtaaaagagctcccgtcatccagcttaaccggtttttgttttctgatccatttgtagattgtcgtttcagacaggccatattcgctgcagatctgttttactggtgttccagtttgataaagctcaaccaccatttccttaaattcagcatgataacttttacgtttttcgcttgtgttacccatatccggacacatcccttcgttaatattatatttcactaaagggtgtccatgaaactatactagcatcaatgctttcctgctccgaaatataggcatggagctgtgaagctatccgtgacaaagattgttcacccgaatcaatgaccataatttgcttcttattttttataagtgacaaatttttcgtgactgattctctcaatcggctcaattcatccagccggtcgctcatcaagagaaagggaccgctggcattcgtgtcaatcgcaattggtgttacattttcaaactccagcccaattggaatccatcctttttcagcatattcctttgcagccggatttgctgcaaactgcggaaattcaagcacttctggcatcaccggaattggggcaggccgctttccgctccagaaacggtccatttcctttgcttctttttgaatattttctatgatcgcaagggtatccgttccgctcgctggcaatgcggtttggaacaatatcggattatccaactttacgatccctcttcccggtatttcctcaatttcaatatctgttttccctacaatggcacggacatctgtacggtctattaaatacaacggaatttgtattttaatatttgataatacttgcattcgcattgcgttttgccggctggcgctaataacaagatgcaggccgatacttgctccttccctggcaatttgtgtaatcattttctcaaaagcatccgaatcatccgcttccctgacagcatcgtaattatctatgacaaaaagcaggtcaggaacatgttctttgcttgctttctcgtacattttcaagtttgcaaccccgtactggctaagccgccttttccgctttttaatctccgacgaagtaagccggatcagttttgagatcttttccgtttcatcaatcatgatcgtatcagcaacatgcggaagttcctttaacgggagcaagccgtttgtaccgaaatcaagcaaatatatatgcaagtttcccgggttgttcactctggccagatccattaccgttgtttgaaggaaggtcgattttccataccccgggcttgaatcaatcaaaatgtgcccatctttcgccatattgagctgcagtactctttgctcttgcattgcaggcaaatccgcaaaaccaattaccggcttaagatctgttttttcatttttccaagcttccctaaactccaccccatgcaattccagcagatagatccgctcttcaagcggcggcagccacggttttggtagttgggcgatgccgagttttttggcgcgggcatggatccaatcgacgacggcctcgagttcggtcgggactttggtgatttctttctggttggcaagtccgcttaagtctgcagaaataggttcgtactggccaaggtcgttgatcgcataaatcgtggtgtccaacatgtcctggtcgtcctgatccgggacgtagttggcgccgctccatgcgctttggaacaactcatagacttcattgttgccgacctgcaagtaggcgcggcccggcaaggtgatctctgcagcatccggcgtttttaaaatttccatggaatcgcttgtgttttggactttgagcgccagtttgaatttcgagttggaccagatttggtcgtcgacaaccccgctcggtttttgcgttgccaaaatcaaatggatgccgagtgaccggccgatgcgggcagttgaaacaagttctttcataaaatcgggctgctccgatttcagttcggcaaattcgtctgaaatcagaaacaaatgcggcatcggttcttttgcttcccccgatttatacagtttttggtactggttaatatggttcacattgtattccccaaacaggcgctggcgtttctcaagctctgccttaatggaagcaagcgcgcgcatcgactgggcgccgtccaagtttgtaatcgtgccggcaagatgcggcagtttccggaacaggttcgccatcccgccacctttatagtcgatcagcaaaaatgcgacttcatacgggtgaaagttaacggcaagcgagagaatataagattgaataatttcggatttccctgaaccggttgtaccggcgatcaagccatgcgggccgtgcgctttttcgtggaggttcagctgaacaatatcttccttcccgcgcagaccgagcggcacagccaggcttttatatgtttcatttcgggcccagcgcgcttcaattgcaagatcttccactttttctacgccgtacatttcaagaaatgtgacgctttctggaatagcatttttcaagttttgcaggtggtttaatggtgcgagtgcccgcgaaatatcttccttatgaaagcctgcagggaaatggtcgggcttaaaccgtttgttaacgagctctccgttttcgatcatgatattgccgtattgtgcatcccggatatcaataaccgttttcacatgttccggcaaagactgcaaaacatcttcaacgaatacaagtgaaaccccgatttcggtcggatcttcattcaagtattccataatggtgtgatccagaatcagcttttcatcggtgataaaaatgacaaaatgcggcgagaaatatattttttcatttttatttcctttttcttcgatgcttagttttctgtcttttaaaatctgataaagcgaattgagcacctggtcacgggaccgctcatgatagacaaaaccgcgcacgttcatctcacgtaaactggcatgcggcaaccagcgcatccagtcccatttttctttttcttcttccggaaaaatgacgacaaactggacgtcatggtagctgtgaaacaaggctatttgcgccgccaagagctgcagctgttcaaggacaagatggcgctgcccgatgtagccgacgggacattcagcaagcgtggcggtcaccggcacattttcaagcgtcagatactgcgaccaaattttacgggcttcttccacaagctcatctttctcctgggtgaattcttcaagattaaattcaatcggaaaactcgatttgacatctcctgtgcccaccctgaacatcagaaaatcatggtgaaacattgttttttcataaatccgcgggtcaacccggagcgccatatcgcggattttcccaatatccgggtaatggtagaacaaagcatggcgttgctcttccgccgcttgatgcagttcgtgcgatttttcttttaaataggccctgtaagattcgtcccgctctttaatatttgcacggtactgccgcaaatttttcaaataagaggtgatggcaaaaatcaccgtaacgacggtcatcgacagcatgataatcaggtaaaagccgttgcgctgaaaaatggaaatgacgacaaatgccgcgatcatgacaagcggcgggacaatgacccgtgccagttgttcgctcggtttggccggctttacaggcggttttgcaattttgcgtttttccgccggctccctgtaaatgattcttggcgagcggtggtaatccggatattcatccggcaaccggttttcgctcctgtacaaaggagccagggccgtgtgaaaagtatccggcggagcgagcatttccagttcatgttcctcgatattgagcagcatgccttctataaacaactggtcgcccggctcgatttcggcgccgtcgcctgcaagcgcaaagttatggaacatttgccccttgttcaactgaagccggaagcttgcgccatcacgcaacagcacaaaatccgcatcgatatggagcaggcggacatcatccccgccgcccgttccgaaagtcacagcctgctttgcggaaatctcatataaattcccggccttttccacacccaagtacaaccggacagccccgttttttgtcctgatttccaacggtttgcccgcttcgagcacttccccgcccagccggcatgcgcggccgtcccattggatcaggagcggttccgcgagcccgtgaaaatggatgtgttcctcctgcaaatccccgattttgaccgttttcggttccttttctttcaaatggcatttatgcaattcgtttccgtatgccgcatacaaaatccgttgtgccatttttctccctccgctcattttccggccgaatcttttttgtcattcccggtatcctttgcatcctttttagaatcctgttttttatcttttgctgccggttcctctttgctggcagcatctgccggctgggcggatgcatctgccccggttgccgcgccatccgtttccgccgtgccggtgccgttttccgatgcggcatcgcccgtattgatcggaatgccgtatttttttgcataggattgggctttttcttcgtattgcgccacttttgcttccctttccgcaccgcttaaatggggatcattctgggcctgttcctcttttttaagataagcatagacgatcaggaccgggtcattcatataaagtgcgagatccaatgacttgtttaaattgccgcgcccgttgtatatccagtacagcagataatccggatcgcttttcaggctgatgttgttcatcacattggttttcgcctcatcatccatgttttccgttttcacataggaataggccaaaacatatttcccggcagcaggcagtttttccggattcatgtcgtttaaatcgctgatgacacccgaataattttcggaaagaaaatcatggtgcgccgcgagaagatgctgctggaacgggaatttcataaatgcgaaatacaaaagcggaatggcaagcaggatgcaggctgccatcatcgcataggacaaccgtttgaaaaggcggaactgctttttcggcacagtttgcaatgtgcgctccgctgttttcttttccaggaggtactgctcataaagaaatgcggcaagctccccggcatcctccatcccggcaacccggcgttcaaattccgtttctttgacatgttccaaagaaccggcatacagctcgtcatatgtgtattttttggagaacaatgcaactgcgaggcatttataccggtacaaaaattcatccccatcctgttcgtacggcggcagcacaccgcggatccccctgtacaagcaaaacggcatcagattttcatcaaatacaagattttgaggatggaaaaagcagatgaatctcgtatcaaagcatttccggaaccgcgccaaattgtgtagcaggcggagtttttcactgcggcttaaacgaatggctttctcccatggggtaaggccttctgtccggaatgaaaaagtgaaaacatcttccccctcttccaccgtaaccgggagaaacaagtccatcgtttcttccaaaaggcctaactgccgggcatctttcacacgcgtctgcgattttgccatttcgagcttccacacgccgccatccatgctgtattttatttctgcggcattcaactttacaagtttttcctccatctgtccggctccccttttcaaacaaatatgtaaacattacaaaacaaccagaatatccccgtttgcaaccgggaagtcccaaagcctgtcgtcatccgatatgacgagttttttagccgggatttttactgcaaacgggcgggtttctccggcgtccagcccaagggcatccattagctgggaaagcagctggcggacaggctgatgggcgggaatccgcacatcataccttcctttttgccatttttgaaaatcaacggttacatttaaatgtgttccggccggcatcccgtcaccctccttcaaactgctgatgtgaaaattcaactgtctttccgcaatacggcataagcgccgcctgccagcagacagacagcgccgaaaagcgagccggcgaggattcctgcatgcccgccttcctgcctgttgtttatttccggcctgtctgcagcatcggttttgtagtcttttgaaaaaagggatgaggccactttggctgcagtcgtttgtttcgtgccggttttttccgtaaacaaagtttttttcaattgtttgccggttttcgcctccgcctgctgctttgctttaacggcctcggctgtttgctttttaaaaagggctggggcgagtttttcctgcgcggtttccacgtcttgccggcccccgctgttttccccgatacggccggattcaatctgcagttttccgctgtgctccaggctgtctgatgcaaaagccggcacagcatggaaggcaagcgcggcaaacaaaaccgcgattgccgtattaaagtgcctggtggacatcgtcctcttccgcctcccctgcttttgtaaagcggttcagaacaaacagctggccgatttctgccaacaggccggcagaaacgagtacaatcaggtagcgtacggaatccacattgcggctgtcaaatccggcaagcaggtcctggatatactgtaaaggcgaaacccgctgccacattgcagctgccgaggacggatcaaagtggatgccgagcgtatctgtgagaaacaaatacaagcaaagcaccatcagcaggataaacatgccggccatcttcagttgccgcagcaggtaggcggcaacagccaccattgaaaagctaatggcaacggacaatccgaaccatggcaaatatttgtcctccgcgatatgcaaataggcggctgaaattgcgccaatcagcaggccttccgcaattcctgtgccggctgtaagaaaagccgccggcatattggccgcatacaacggcttttcttcttcaaaagaactgccggaggcgcgccgtttttctatcgttgaaaggacataagccgtaaacagtgcggaaacgaagaaaatcagcacgagatagtatggcacaaagctgtcttttgcaacgatcgtcccgctgtttttcgtctgaaccgggttggacaaaaagttcagcaaatcttcattcgggcggttgccaatacggctgtttgccagtacacctgcgaaatttttcgcgaatttctcatcgtccgaaagcttgttgagcaggttgtcagaaagcgaattggcccgttttaccaaagtctgcccgctcgttttgatgtccccggcctgcttgtcaatctcgtcaaaggttgtaaaaacggtgtccgcagcatgcaggttatgctcggatacttcttttaatgattcgcttgttgcaagcagcgttgtcagacggtccccgagggaaacggccattgttccttctttccccatgctttcagccatttgcccgttgtctttttgaagatttagcgacgtttgccgccaatcatccagctgctggagcgttgctgcaatggcggtattcatattttctgcttgtgccgtggcagcctggatttgcgatgccatttgatcggcatggcgttgtgtttcttccacaagctgcagccagccgtccgttttgtttttcaatactgccgtctgtgcgcggacatcctctgaaatctgcccggcaatataagcggcaagcacatccgcgatattctgcttgttgaacaggtaatacagcgagccttccgtcgcagcatcttttaagctgcccgcacccgccaaatcatctgcattttttccgaagtacagttcatacagcattgcggttttctgatattcccgtatcgtttcatttttttagggtggggatagggacgggagctcatcgcttttgatttttgaattttttgtaaataactttttggctggcgcacggcccccttcttgaacttttgcttgcagtgtatgccccctgtgcggaaacacaaaacaattgaacttcaattggcacattcctttgccaaaaagcagtttacttttcttcctttttttgctatcattctaaatatttacaagaaaggggaggatacaattggcaaaagcaataccgccattccgcgccgatcatgtcgggagtctgctcaggccggaaaagttgaaacaggcccgccgccggcaagaatcaggcgaaatcacaaaagaagcgctgcgtgaaatagaaaatgaggaaatcaaaaggattgtggcaaagcagaaagaaatcggcctgcagtcggtaacggacggggaatttcgccgggcttactggcattttgattttctcgaaaatcttactggtgtggaaggatacgaatccgggagcggcatccagtttaaagaaaagcagacgaaatcgcattccatccggatcatcggggatctggatttttccggccatccgatgattgacgattataaatttttacatagcgttgccggggaccatttgcccaaaatgaccattccaagcccgagcatgctgcatttccgcggcaagattgcatacgggcgttaccgggcggatgaagatttgtttttccacgatctcggaaaagcttataaaaaagcgattgccgctttttacgatgccggctgccgctatttgcagctcgatgatacagcatgggcatacctttgctccgatgaacaaaaagaacagttgaaagcccgcggggtgaatccgggccatctggaaaaactttatgcccgcaccataaatgaagcagtcagcggacggcccgatgatttgacagttacgatgcacatttgccgcggcaatttccgttcgacatggattgcttccggcggctatgaaccggtcgccgaaacgctatttaacggcctcaatattgacggctttttcctggaatatgacagcgaccgagccggcggattcgaacctttgcgccatgtgcaaaggaaagacctgcaaattgtactcggccttgtcacttccaaattcggcgacctcgaaaatgcggacgatgtgaagcgccggattggcgaagcttccaagtatgtcccgcttgaacagctttgtctcagcccgcaatgcggtttcgcctccacagaagaaggcaatctgctcactgaggaagaacaatgggcaaaactatcgcatgtagtgaagattgccggggaagtttggggataggcagcaggcccagactattttccggcaaaaaaaggacgatgcgccgatcgattccccgcatcgtcctttttgaatcactgctttttcagaccctcacgatttgtttttcgggcaaacgcgcggcttgcccttcacttaagcgccaggtatcccgtgcaatcatcaattcttcgtttgccggaatgaccagtaaagacacttttgaatcaggggtatgaatatacggcccgttttcttcgtttgactggaaatccaattttgccccaagataggctaaattggacaccactgcttgccggacggaggcagaatgttccccgatccctgccgtgaacacaatggcatccaccccgcccatcaatgcaacataaccgccgacacattctgtcacacgattcacaaacattttgattgccaattccgcctgctcattatgggcttttgctgccagctccacgtcgcggaaatcatttgaaatctcggaaatgccgagcaagccggactctctattgaacatatccatcatttcatcaatggtgtgccctgtttttttcatgataaatggaaggatggaaggatctattgtaccggaacgcgttcccatcatcaatccggccagcggggtaaagcccattgaagtattgacagactttccgccttgaattgcgcaaatgctggaaccgttccctaaatggcaggaaatgattttcaaatctttcaatggtttttcaagaagcagggccgcttcactggcaacatactgatgattggttccatggaagccgtatttccggatatgatattggttgtataatttcaaaggcaccggatacaaatacgtttcaggtgcaagcgtttgatggaaagcggtatcgaacacggctacggcacaagctttcggaagccttttcataaaagccctgattccgagcaacccagccggattatgcaaaggtgccagttcgcacagattttcaattttttgaatcactgtacggtccagtacggcagaatccgaaaagtcagaaccgccatgtgtgatccggtggccgacagctgaaatttcatttaaatcatcgacaatacggttttctaaaagaatttcaatcaaataatccgcagcgtcacggtgatcgtggatcggcggtttttctttttggcggaaaccgttgattttatatgaaacctcaggcgcgtcgaatccgattcgttcaaacaccccttcaattaaaatactttcatccggcatattgaagactttaaattttaatgaagaactgcctgcattaatggccattatttttttcatattatatccctccgaaatcacaaacttatcattcatgtgatttatttcacaaatatttatatgcgtttccttataatacaagtataaagaaaccctttgtcacaaatttgcctattccggcatcaaattctgttgaaaatacggaaaatgatatttttttgttgcgctttcatttataatgaggctagaaatcaatgtttgcgctttcccgcctttttgcatggcaaatgattcatttgtatttttttgttcagctttgaacaaaattttgcaaccgcttaaatgattgcttttttgaaaacgggggttttgtgaaatggcaaacaaacaacagatcgaaaaagtaatggaaatgttttcttctgcgaccggcctcacagcggtttatgtggatattgacggaaaagaaatttcggatgatgatcaattcccgcctgtctgccaaatcatgcggcaagttccgcatctccggaaacactgccaaaaatgcgcgaaatgcggcggctttgaaacaatgaaaaacgggcagccgtgtatttacaggtgccatgcgggcctcgcggattttgcggttccggtaaaaagccgggaaaacacgctttatggttttatcattagcgggcaggtacgcctggaagatgatgaaaatcaagtgaaagagtttttgcaacaaaaaccgcttgatctgtcttaccgccatgattttgcggccgcctacagcaaacttccggttttttctttagaaaagttatctgcttctgccgaagtgttaagtactttgtcagcatactatttgccatccattttaaatgaagaagaagcaaaaccggcgaaagaaccagcggcccaagccaaaaaacatgcccggtccaagaaagaaataaagcaagccctgaaatatatccagaaacacattcaccagcctgtcactttggaagaagtcgccggccatgtgtatttaagcccgtactatttcagcaaacttttcaaaaaggaaaccggcgaaacatttgtttcttttgtcaaccgccaaaaaatgaatctagcgaaagatatgcttgccaacgatgacttgccagtttcttatattgcgcacagcctgggctttcgggagatcagttatttcagcaaagtgttcaaaaggtattaccaaaccaccccgaccagctacagggcgatgtcccgtaagaaaggatgacaataagcatgaaggagccccccttttttcaggcaggatttctattcttttttttaaaaaactgattgacaacacaacccgttccttatatactaaatattgtccgacagagatgaatacgattccgtagctcagctgggagagcgccaccttgacagggtggaggtcgctggttcgagaccagtcggaatcatcctgctagcgtcaatccgtacgtatcaacggtttggcgcttttttcatgaccgctgacatagtcggtgacttgtccgaacggttacggttaccgtcacccgatatgttacacgcttcatttaggaggcgtgttttgatgcgtaaaaataaccgcaaaacagatgatcgcaagatggcaacaaacctcgataacctgttcgaaattttctacacgattaaaactgcggaaggccgcgcgcctggcacgttaaaacaataccgcgagaattaccaatattttgctgtttttttggacaaacgcggtattcctcgtaacattaccgatatcacccgtaataccatacgcgactatatccgttacatgcaaacggaagtcattaaatacgaaggccaccggttcaagacggcagcacaacaaacagcagggctttcgcctagctcgataaacacacggttgaaaacgcttcgagtgttcttccgctgccttgtcagcgaaggtttactcgacaccaacccgacccacggcgttactaacgtaccggagccgcaggaaaaaatcacaatcttaacaccggaagaaatgaagcgtttgacgttccgaataaaaggagattcacagacttccgcgactatgtactgggtctgtcccaattgcaaaatctgtgcacccggctgttgcagcggctgcggaaccgctggatgatcctccgggaatacgatctttcagaacaggattggccggagtgccgtagtgaacattttctccctttcaaaagggctttttcattttgtcattcattttgtaaaatggattgtatttcgttcgcagtttcagtatattaatacatatagatacttatagataagaatggcttacattttgaaataaaggagaggggtctatgcccaggcaatatgatggtgccgccgttcagctggatgaaattgaccgccaaattatccagcttttaaacggaaatggcagaatatcgtttacagatttggcaaaggaaatcaaactttcccgtgtggctgttcaatcacgcgtccattccctggttgaagatggtgtgattgaatgttttaccgccgtcgtgaaccctgaaaaaatcggccttcaccagtccgctttttttaatgttgaagtagagccgaaacatttacaggaagtggccgaaacattggccaaagatccgtcggtttcaagtctttatcatatgtcaggccccagcaaacttcatatgcacggcttatttaaagacaaccaggaaatggaactgtttcttaaagagcggttatatccgctgcccggcattatgagtgtcgattgccagattttactcaaacgttataaaagccggattggaatgaaactgtaagggggttacattgtggaaaaacagcaaaatacttatgcccagcttgccatggcaatgcttaggaccggcattctcggctatggcggcggcccgtctgtcatgccacttttccggtatgaggcagtgacaaggtacaaatggctggatgacgacgaattcggggaaacattggcaattgcaaacgcgctgccgggcccgattgcgacaaaaatggccgcttacctcgggtacaagttgaaaaagacaaccggcgccgtgttcgccattttactccatattcttccgagcagcatcgccatgattgcgttgctgtcgcttgtatcggtactaagccattccaagattgtggccggaatgattgcaggggtcatgccggttgttgccgtcatgcttggacagatggcttacgactttggggaaaaaacggtcaaggggcttggaaaggttttcggaatcgccatgtttgttatttcctttctcctgcttgagacgatccatctccacccggctattgtcattctgatttttcttgcgtacggaagcatccactttcgtctcgttgcaaaaaggaggaaaaatgaaaaaaagaagaaaagggatgaagcgggatgatctggttccagttaatgcttggtttttttattgcaaatatcctcggctacggcggggggccgtcctccattccgttgatgtaccatgaaattgttacgcattacggatggctgaatgacagcgaattttccaatatgctggcactcggcaatgcgctcccgggcccgatcgcaaccaaaattgccgcattcgtcggctacggggccggcgggtggacagggctgttagcggcttttgccggaacgatattgccgtctgccgtggcgttgattgtgttgctgaaagtattgcacaaataccgccagtctcttgttgtgaaagggatgtccctgcttgtgcagccggtcatcaccattatgatggtggtgctgacgtggcagatggcgaaaagttctttcagccaaatcggcatctggcagtcacttggcatcgccgccgtcgctttctgggccatgaatatccggaaagttcaccctgcccttgttatttgcgcggcattcatctatggcggcattgtgcttcagcatatagtgtaacgggatagaaggagaaagttcccacacatttttctttaaaaaacctggatgcctgcttcatcaggcatccaggttttttactatgttcacttttcccggccgtttagcgtttgggagagttcaataaagaagtcgagtgcttccggattggccattgagcccctgttcacgactttatcgaccgggaagccgagcaatattttacggatcgggacttccagtttcttcccgctcaatgtttttggaatttgttcaacttcataaatttcatccgggacaaaccgcggcgaaactttcgcccggatttcggttttgatgcggtttttcaatgtctcatccatatgccggccctgcttcaggacgacaaatagcggcatgaatgattgcctgccgagatgttccaggtcgatgacaaggctctcgataatttcatcaatgccttcgaccgcccggtaaatttcgctcgtgcccatgcggacgccctggcggttaattgtggaatcggagcggccgtaaatgacacagctgcctttttcatcaatcttgatccagtccctgtgccgccatacccccggatagacatcaaaataactttcgaagtaacgtttgttgccttcatccccccaaaaatacagcggcattgacggcatcggatcacaaatcgccagttccccgacttcattcacaaccggcttgccttcctcgtcaaatgcctgaatatttgcgcccagcccgcgcgtctggatttcgccggcatagaccggcaaaacaggcgacccgccgacaaatgcggtgcaaaggtccgtccccccgcttgtcgaaaccacccataaatccgctttgacattttcgtaacaccaaatgaaaccttctgccgtaagcggggatcccgttgacaaaattgctttcagacgggataaatcatgtttttccttcggcttgacgccggatttcatgcatccactaatgtaccccgcacttgtgccgaagtgggtcatgccggttttttccgccaaatcccataatgcatccatatccggatatgccgggctgccatcgtacaggacgaccgtcgccccggccagcaggttgccgattaaaagattccacatcatccaaccggttgtggtgaaccaaaaatacacatcatccggctccaccccttgttcgacttttaaaattttcaagtgttccaaaaggatgccgccctgtccttggacgatcggtttcggcaggccggttgtgccggatgaaaataaaatccacagcgggtgatcaaacggtacaggttcaaacgcgagtttagcttcttctttcagcacttccttaaaggagaccgtgctgctgtccggttttatctctccaaaatccatataaggcaccacgatggttttctttaatgttggaagtgacgcctgcagttccgtgatgttttttcgtttgtcaaaaatcctgccgttataggaatagccgtcaacagcaaataaaacagccggttcgatttgtttaaaccgctcaatgacgctctcgttgccgaagtccagggaacacgacgaccagaccgcgccaatggaggcacatgccaggaaagcaatcaccgtttccggcatgcttggcatataggccactacccggtctcctttttggatgccaagatttttcaggtactgtgccgtttttgctgttttttccttcagttcctgccagctgacttccctttgccggacggtttccgattggaaaatgagcgcaggcttgtgctttctgctgttgcggaaaacgtgctcggcgtagttcagcgtggacccggcgaaccattcggcaccgggcattgtccttgatttcaggacttgttcatacggcgtatgggaaatgacaccgcagtattcccaaatgctttgccaaaacgtttccagctgatccacggaccatttccaaagatcctggtggcgctgaaatgccaagccgtattctttttccagccatttacggtaacgggtaacccctgctttttcaatccgctccccagacggctgccataataatgccccttctgtgaccgccttcactcggtttcctccccatcttcgtgatatacttgtaagcgctgtcttttactattttaccaatacatgaaatatttcgtcaacgaatgaaaaggcgtttcatggaaaatgggggaaggccctgcacgcttcttgcctcttcttggatcatacaaaatgtcaaatagcagctatgttcttggcgcttttttcgtcccgttatgtttctccagttccgttgcagaaccatcatttgggcaggcggccgtataaaactttcccggatacatatgctattggctgtacgagaaggtgattttgtggggaaccagaagaataacaaccaaaagaacaacagccagcaaaacaaaaataatattgcggaagatgtaaaaaatacggcaggtgccgctccataaagggctggaaacgacagaagatgtggcgatgaacgctgtggatgcaacttcaaatgcagtcaacaatgtgacgggcggatcgcaaaacaataaaaaataaaaagtgccgggaaatgggcgctttttacattctgctcgccacttcttttacaatatcttcagcagacatgccttttgcatcaatgacaggcgcctttgtcatcgtgtcattgatccccattgcgttcatctcgctgccggttacaacacagcagtcacaaccttgtacatcttgttcgttcttaatggttttcacttcatatcctttatcgcgcagcgcttcctggacatttgtcaaagcctcttctacaccgattattacagccatggttaacacctccctttttttatcgtacccatctgattttagaaaaaacatgtttttcccggtcgcagacggatgctttttattttttaatggtgctgagaacccggttgatttctgtatcatgtctcccggttttactgaaatagccgatatctttttggcacacgtcaattcccgtgcggcggcagcaaaaatatttttgtgttcttccgcttttcatttgtatatttaaaaatcctctccgcatttttgaatacattcatcatgccccgtattgaaaagccgcacagttttgccaactgtgcggcttttttggcgtgcgcctttacttgccgagcaattcgtccgaaagccggataaattcgcgggcatcttctgccataaggttaatgccggctgcccagaagtccggttttgtcagatcaacgccaagatgttttttggcaagatcttccaccttcatccggccggtatcgcgcaaaagggcaatatatttgtcttcaaagccatctggattcttcaaaaattcggtgtaaatgccaaggctgaataaataaccgaatgtgtacggaaagttgtagaacggcacatcgtcaataaagaagtggagcttgctgcaccagaaatgcgggtggtagccggacaagctgccggcatacgcttctttttgtgccttttccatcagttcattgagcctttgttcggacacaatgccttttgaacgctcttcgtaaaaacttttttcaaacaggaagcgggcatggatgtttaaaaacatagccgttgcattttcaagctttgcatttaataaagaaactttttcttcctttgactttgcattggcgacagtcgcattgccgatgatcgtttctgcaaaggtgctcgccgtttcggccacgttcatcgcgtattcgcggttcaaacgcggcaaatcgcgcatgacatggctgtggaaggcgtggccaagttcgtgcgccaacgtgcttgcatcatttgtggagccggtaaatgtcataaaaatccgcgactcttcaaactccggcagactggtacaatatccgcccgggcgtttattcggccggtcttccgcctctacccagcggttttcaagggcgtgtttcgcaaatgcagacagtttcggcccgaaagaagcaaaatgttggatgacaaaatcgcacgcttcatcatatgtaaatcgggccggtttcatatcgccgagtgcaaccggcgcatcaacatcctgccagccgagtttttccatcccgaaaatttttgctttttggttgagaaagtcgacaaacggctgcttgttttcagaaacggctttccacatcgcatgaagcgtgtcttcagacatccggttgtattcaagcggctcttcgagaaaagacttcctgccatgggctttttgcagcgtaatccggtacccgtccaggtggttgagcgtatcggcaaaaaccggcgcatatttttcccatgccgcttcccagttttcgaacagctgtttgcgcacttccggatccgggtcggcatacatccggttcatcgcctggccgacggataaggataccgtcttgccttctttgtccgtaaacgggattgtcataacggaaacagctgtgtcatacaatctgctccagccggccagcccgtcctggttgagatcggcaatcagcttttcctcttcttccgacaagagccgttttccttcatcgcgcgtttcattgagggcaaaggagacttcgctcaattccttgtcctgtaaaaactttttccagtcttcgtccgaaatggccaccagttttttctgaaaagtggtcccgagcttttgcatctcgctgtacaaatccatgatttggcccatcacgacatttgcatagtcatcatccatataggcatcatgccacatttgcacaaatgtcgcagattggctgagccctttttcgatctcttcctgttttttcaggatggctttaaacggctccggagacgggtctttcgaaaatgcccatccgtcgagtcggcttttgtattgcccgatttcttctttcagcccgcgcagtttttcctgcaattccggcgattttgtgccgcccggaataacggcatccagatcccaagtattcttatatttcatatttgcaactcctttctttcttccattttacagggtaccgcacaaaataccaatatatttacaatcacggtaaaaaatttcagggccggatctttttttgggggaatgttttgcatttttaaaacgccaagtgggcatttgcatacttaaaaggcgcggctacatcaaccgcgccttttgtttaatacatccaggcaagagaccccatcggatcccaaggtttcagggcgatcggatcttgttcccatgctttttgcaattcctccggcaaatattttttgtcaatgacgatttggtacgtatattcatccatccaggcgtcactcatgacaaaataaccgtctttgcccactttttcaccccagctgttttccactttccatctgtccggtttgccgtcaacgaggttgacaccggtcagtaccattgcatgtgtcatcacactgtctttataatcgaggcgttctgctttggtcattccgaacgagaatccgaaagctttttccaaatcaaaaaggccggtatccatgatgccttcattccggtctgatgatgccgcaacatcacagccgaaccagacgctgcggttatccttcagctgttttacggccagcgatttaaaggtttcgatatcgacatttaaatatttgaccggtttgccgccaaccacattgcccaaatactgcaccgtatacgttttgccgtacggtttgtcgcttgtcggcgcattgataatgctaatgtaattgtcgaggtcaaacccgacgtatttctcaaaaaatgcctgcggggtgatattttgctcgcgatggaacaatttgtcggtatcgcggaattcaaaatcaaaggtcttcggcggctcaccgagtgcaaaggcaagcaatttgtaaacttctgcaagcataccttctttcgcttgccgcaattcttcttccggctgccctgctgcgtgcaattttctcagtttcaccgcgttttcgcggagtttggcattcaaaagcgaattaagttcgcgtgagttgctgctgttatacgtttccggcatgacctgtttcggcacaacgccgtattttttaatgagcgcgacgagcatatcccactgtccgccgtcctgctgcggggtttcaagtagccaggaaatgagccgtccttccacaggttcgtctgcggtttccatcatcgtttccaggaagtaattggctttttcaaatttgtcccagaaaaacgtatagttttgtgaaagctcaaagtctttcaatctgaatttggcattcaacttatgcgtaaacgtgtttaaggcggcaaacatccagcagcgcccgctttgtttctggtttgatactttccccgtttcaatttcgtgggagaatacgtgattcatagaaacaacagcatcattgttgattgccgcggcctttatcccgtttttcatcattgcattttgaatcactttgttttgcggcagttcgcggatttgtcgggaaaaccgctccgccatttcccgtgtaatgtcttttgccatttaaatcttcctttccattaagttcttttttattatacgcctttttcaatcagataagacaattttgcgtttttgaaaagcctgcaattctgaaacgggacacaattgggcgatatttccttttcacttttccacttgttcgtcccgctgttcggtgaggaaggctttttcgtctgttcctttcacacatttttttaaattatggtatgctgttttacgagaaagactcaaacggggtgatggcagatgagtgaagaaaaagattatgaaacaaaaggttatgatacaagcattgtttatgattataaagagatgcccgacgtccacccagggcgctgtgacaattgcggttacagccactttaagtcatcggtcaaacatggcgtgttcctgcgtgaatgccggagatgcgggatgaaaaagagtatctaacgtttcaataaagcggatttcctacaaatggaaaatccgcttttattcagttggaaggatatttcagccggcagccgatgccgcgaaacatccggactgggccttgtgcaagcagaagcgcctgtccgtaccggtgcgtatcaagcaaaatatgtttataaacattttccagacaatccgccttgcgcagctttgccaccagggcataaaaaatccggggcagcccccggaccttcatcgtaaatctatgtaatacagctttatttgctgaaccaaataaagtaaccggcaagcaccatgacgacaagaaaaagcacaatggtaccaaagacgactctttttgatttcaaaataaaacgctcccctctgacggactttctgttacattcagtttacccaacgaggggaggattcaaactggcaggattaggcttcttttgacatttgcagcgccttcagaatggttttcaacgaattgcttttgccgtaaagcagcacgccgccgcggtagatgcgcgcacctgctatcgccatgaaaacaatcgtgacaaccataaccgccacgcccgaaagccctgcccatactggcaagtcgagcatgccgacccgcaaaaacatcagcatcggcgtaaaaaacggaatgtacgaaagaacggtaatatagccggcagaagggtttccaagccctgccatcgcaaggaaaaaaccgatcatcacaagaaacgtcatcggcatcatcatctgctgggcatcttcaatccggctgacaagcgagccgagaaaagccgctaacgtggcatacagcaaatacccgagcaggaaaaacaccacggcatacacaatcgttgaaacctttatatccgaaaatccaaacacagaaaaaaagccgcccgtcaagtgattgatattttgtttgatagtggcgtaagcggcggcaaggagcaccgccatctgtgtcaaaccgagcagggcgccgctgatgattttcgcaaacatctgctgcacaggcggcacgctcgaaattaagatttccatcacgcgtgaagctttttcagttgccacttccatcccgaccgcactggcgtaaaaaatgaccgcaaaataaatcgcaaacagcaaaatatagacaagccccctcgcctgcgccagttctgcttcggattttgcatcccgctccagattgacacttttaaaggatacggggctgtttaaaagcgagagcccggcaggcgaaagtttcaattttcctgccgccatattgctttttacagcctgtagcgcctgctcaagactgtccgtggtcccggtatcggcaagattaggggctttatagaccgctttcggcatgccggctgcgtcaagcgataaaacaacatacccttgatatttttcatttaatacttctttccgcaacgcactttcgcttttttcggcctgcacaagccagatatctttatcaacggtttttaattgctgcttaagcggcccgtacaggttgttcgtcttatccagaaccgcaacctttttttgcttgctgccggcaaacatatcaatcatccggtttatgttccccatcagaaggacagcgacgagcaaaatggccgtcgtgatcacgaaggatttggttcttagttttgtcatataggcatggccgattaaaatgccgaacctattcataggaagcccccaccttttctatgaaaatatcgttaagagatggttcttcaagcgcaaacttgcggatgaaaccttttccgttgatttcatccaaaattttttgcgccgcttccatccggtcaatttgcagctccgccccgagcgccgttttcttaaatcgtacgacacccggaaaggcacgtaaaaattccagatcaaaatcagcatggatcacaacattttgtttcccgaatgcacgtttgacctctctcagttcaccgtgcacaaccgggctgccatgatgcataatgcacaaatgctcgcaaagttcttcaacatgttccatccggtggcttgaaaacacaatggtcgcgccctgatcccgcagttctgcgaccgctgtttttaacgtttccacattgaccgggtcaaggccgctgaaaggctcatctaaaatcagcagcttcggcttatgtaggacagcagcgataaactggatcttctgctggtttccttttgacagctcttccacccgtttatccaaatattcttcaacacggaaacggccgagccagtatttcagttctttcaccgcatcctgtttgcccatcccgcgcagccgtgcaagataaacaagctggtcttttacttttaattttggatacagcccgcgttcttccggcaaatacccgatttccgagctcaatgtgtaatccattttgcgcccgttccaggtgatgtttccttcatttggctttaataaaccaaggatcatccggaaagtcgtcgttttcccggctccgtttgcccctaagaaaccgaacagctccttttccgggattattaacgacaaatcgtttaccgcggtaaacgtgccaaattttttcgtcacatgttccaacaccaaggacatggtttcccctcctttgttcgtacttacgcaaaccggccggaaaagtttcaaaaaactgcaggaattttcccctgatgatccacatatgttaaaaatggacttactgccgtccattggatggatgatttttatacagtttcagtgatataaagaaaaaattaccgctctgttgcctgctacaaaaagtcatcgccatgcaaattggtgcccgggcttgatgcaaactgaaattcattatgtatataatttaacctaaaccttcctactttttatgtattgcccgcagcaatgttagctggttttgctgtaaaaaaatgaagttcatttttatatagctggctttttacatttggcgactcgtaatttcaaaaaaagcagcgggttgtctatattttccgccgccttttttaaggttaataagccgtccacccggcatctgccgtaatcactgcgccatttacgaaggaagcatcgtctgaagcaaggaacagggcgacagttgcaatttcttccggttttccggtcctcgggttgtttgccgacccggagatggcccgctcaagcccgaaagcattcggttcgctcattgttgtgccgatattcgtttccaccccgcctggcgcaatcgcattgcagcggatccctttcagtgtgtattgaaatccgacatttttcgtcaacccgatcaccgcgtgtttggatgccgtataagcggcgccggcccgcgacccgttcagcccgccgacagaagtgacattgataatgacgccgtttcctttttcaataaagatcgggagtgatttgcggatcgtacgcatcggcccggttgtgttgacagcaatcaccctttcccacagggcgtctgtcagatcccccgccggcaccatatttattcatgatccccgcattgttgacaagaatatcgagcgttccatactctttcacagcggtatccatcaaatgttgcacatcttcttcgctcgccacattggattggactgccagagccgtgccgcctgcaagtgagacaatctaaccatcttaccgccgggagcgcctaaattgtgaaaacgagacaggggcatacctattttcctttgattgcgtcaagcacttcctgctcgttcatcgcccattccattcgaaaaattggagaagcggccgccactcagctaaattttgtattatcatttgcttgtttcatatgcctgttttccgagcaaaatcgcccctgtaatgccggcgtcgttgccaaggcccggggacgtaatatattcggacagcggttcaggcagcttgatataaccgttgatcagctcatccagccttttgtagatcagcgggaacaattgctgttggtgcattaccccgccgcccatgatgatttttttcggcgaaacaattaaaacgtattgcatgagcgcctgtgccagataatctgcttccatttcccagacttccgggcggtctgagagctcttttcctttctgcccccaccgcgcttcgattgccggaccggctgcgagtccttcgaggcagtcatgatggtaagggcatgccccttcataatggtcatccggatggcggcgcaccaatatatgccccatttccgggtgcgaccatccttcaagaagattgccttttacaacggctccagctccgataccggtaccgactgtaatgtacaggcagctgtccagccctttcgccgcgccaagcaccgactccccgagcgcagccccgttcacatctgtcgtaaagccagccggaacgcccaatgctttctctatcgtttgtttaatgggataattttgccaggccgttttcggtgttgttgtaatgtatccatatgtatcgctttccggattgacgtcaatcggcccaaatgaggcaatgccgattgcttttgtctcaaactttgaaaaaaatccgattacatctttcaccgtttcttccggatcgcgcgtcgggagctcaactctttcctgaattttcccggtttcatctcccgttgcgcaaacaaattttgtaccgcctgcttccactccgccaaaaagcatggtgattccccctcaatagaattggtttaatgagcctctccgttcataacggaaaggtaaatatctctcattctagtataccgttttcttcaattgagttaagtgtttatgatcggtacccgcataaattgtgacaaattttttctcatttttttctcattttttcttcatggctttttagtgtaagagggttatattgtagctgtagcaaggaaaaagcaacaaacccttaagtttctagataccccccttaatgtctagaaaaaactccccttaaaaaccggcattgtgccggttttttttcgcaataaagccggcgcaatcagatgccccggcccgtaaacctgctttatatctcctcgtcgtcctcttcatcccagccgtcttccaaattttcatcgtccagatcccaatcttcccaatcccctgctgtgtccagtttgaacaaatctaacaggcgcttgaacatttgcggtgtctcccttctttttccttataggatttacaggttaaaaccaatttatacggtataagaaagaggccgggcgaaaaaatatacatagaagcaaacccgggggtgacgatatggaaacctggttttatctccatgtgattaacacattatactttgtattttttatgtttgtagtgccgcctgccatcgcagccatgttttgcaggcccgaaatcaaaaaatatttggaaaagaggaaagaaggaaagccatgaaaaacgatggtaaaagaacttctgaagggttaaacgaatggtttgaaatgatcaacgcaaaaggggataaaggagaaatcgcgcagatcgtggaaaaatacaaggcacaggccggggacagcaacgatgctgcccctcaagacaaggagtaggatttcaacaaaaatcgacaattctcatcaaaaacttatttttctttcatgatcttttaggaaaaaacccgtacgattatacctgtagcaaggacaagttacaaaaccctataccaactagacaatcccccctttttgttgtctagcaatacccccttaaaaaccggcttttgccggtttttttatttttggctacaatcaaaatgaaacgaagggagtgagaaccattaaagcggtggtgaaattttgcctgactctcgtattggcgtatttgatcaaccaactgatatcccggttgtttgcctactatctcccggacgaaggcgctggcgcgatctttatcccgattctgatattctcatttgatctgttggccggatatgcaattgcatgctttatttttaaggttgctgcaaaaaatagtccggggcaccgttattcggcatcccggacaaggacatagcggtcttcaatcgtttttggcgatacgagattgccagtgccgagcatgatgctttcgttttggactgcgaccaccatggcaagtgtttcatgctgcttttctttatatacttgcccgattttgattttcatggaaccccacctctattataagagcgtacggcgttttttctgttcttgtatcactttattccgctcgccgccgtctgaaagttcttcgtattgaaattctgtttcatcgctttgtgccgcaagcaaatcagcggaagcctggtggttgtttggtgcagcttgttcattccatttcacacggatcgcctcctttcttttaatatgcgtccgcttccggaaaaacatgcgcgccggattgccgtttccattttttgcgttcccggcttcggcagggtcatccccaacatgcagccgggtactgcacactttttttcggcattcaaacttggaattgtgcccctgcgcttgtccaaaatttaaccgttttcctgatccggtgcggccgcgttgctggattctggatgtttttcgtatgggctggtaaactgaatttacaggcagcgggttgtgtaaattttttccgggacggcggggcatccccatcttgagaaggaggttttcatcgtatggaaattgaaagaggcacgattaaagatatcccgtttgaaagcagggagctcggggaaacactcaatctctgggtatacttgccggcgcgtttttccccgctttatcaatatgacgtatgcatatgccaggacggaaaagacttcttccagctcggccggattgcacgtgccgcggatgaactgcttgcaaaaggcgaaattgaagacttgattattgtcgggatcccttatgcggatatcccagacaggcgccggaaataccatcctgacggcgagcaacatgccgcttatatccggttcttggcgcatgaacttgcccctttccttgaccgtgagtttccgactgcacaaatggcatcgggccgggcgctggcaggagactcactggcggcaaccgtctcgctcatggcggcattcaagtaccctcatacatttggaaaagccgcattaatgtcgccgctcgtgaatgaaaaagtgatggaagctgctaaacaatgtacggatccaaagctgatggacatttaccatattgtcggaaaagaggagacggaagtaaaaacgaccgacggcaagatccagaattttatcacgccgaaccgaaccctgcatcaaatcctggaagaaaaaggggtccccggattttatgacgaatttgacggcgtccactcctggaagtactggcaaaaagatttgccgcgtgcactcagatacctgtttaaaaaagattaattttcggccatttttctgataaaattgtatcataacggcttaatatccagaaaaaggagacattttatgaagtatgcgcttgttgtctttccgtcaaaaaaactgcaggaccttgccaactcctaccggaaacgttacgacccgaagtacgcgctgatcccgccgcatattacgctcaaagcggcgtttgaggcatccgaagaagaggcggaagtttttcgcggggaactgaaagaaattgccaaaaaatacaacccatttttgctgaaagtgacaaaagtgaaatcttttgaacccgtcagcaatacaatttattttaaagttgaaccggcgccggaattggaagggcttttcgcagatttcagagaccgtctgccgggcggtccgcctccgtacccgtttgtgccgcatattaccatcgggcaggagttgtctaaagaagaacatgccgatgtgttccgccagctggaaatggttggcattgaccacgaagaaaaggtaaaccggttccatcttttatatcagcttgaaaacgggatatggactgtttatgagacctatcatctcggaaaggactaacaaatgtggacgtattaactgtaaaaaatgaagaacaactggagacggcttttcaaatccggaaaaaagtatttgtagaagagcagcacgtcccggttgaagaagaaattgacgcattggaacaggactgcacgcattttctgctgtacgatgatgaagggagacccgcaggcgccgggcgttttcggatggtggacgggtacgggaaagtggaacgcatctgcatccttccgtccgtgcgcggcaaaggggccggccgggaactgatgctggcaattgaacattatgccgcagaacaaggcgtgcaaaaatgcaaattaaacgcacagacacacgcgattcctttttacgaaaaactcggataccgtgttgtttccggtgaatttctcgatgccggcattccgcataaaacaatggagaaaccgatcaaataacatccggaaccccgggctggagaaaaagccccaaatccgtgaaaaagcggcgagaagttgtgtctcgccgctttttttcaatatttaggtgatataaaccaatttgcatgatgatgcaatttttcagcaggcaaccaagcggcaatattttgtttattttataatcgctttttcaatcttgctgcttttccggagtaaaaattcgcactccagcgggaaaagattcaaaccgaaagatcaatatattgccccaggccggtaatgtttgcgatgatccggctttttgccggttttcttgccggttgttcatttgctttaaaatggtattctgttccacccgtgacgccgttttgccgcttaacaggataagccctcgaaacggcacctgctttttccacttcaagccgacgcagggacattccgtcataaagtcggtactggcttgcctgataatcgggaattggagcgatcaaactcatggcagtcacccctctaaattgtttctatattcttttccctttcttctttcattttaaacagaaaaatgcggacttgcatctgatttgcaagcccgctttgattactttccgttgttcatcattttgttgatcgtgttaaaatccagttttttcccgtctttaacaatcgattcaacaattttgtcttccagctctttcggtacccgtttgtttgcaatttgcgagacgcgctggatgatgccgcggacggtattttcatctttaaagttcgcgttctgcaaggaatttgcaagctggaaaatgtcattcatattgacgcctgtctttttttcgatattcttgaaaaactgatggtccaccttcgtcgctcctctcttcaagctgttttatcgtatgaaaaaagcagccggaatgacagtgcaaaagtggattttcaagcgaaaagcatttagcatcaattgtgttgggtgtacaagcaggatttaccggctggtgttttgtctttcatcaccccgatgaaggaaagtttggcgtttctcagctctgtgttttgtcttcatcgtccctatgaagaacagttcaccgcttcccagcctcgtgttttgtccttcatccggggacgaaaacagtttgccgttttccggcccaatgttttgcctttcaataccagccataaaaaaagcggggaatcctccccgcaacttgtcagcagaagcttgcaccgacaataattaacagaatgaacaaaacaacgatcaatacaaacgtgctgccgtagccgtaaccaccgccgtaactgccataaccgcagccgccgccataaccgtatccaaacatgtttttcacctcacttcttgtattacactatacaatatgtaaggtgcaggcattcggtataggcgtgtgtcagggacggcatgattatccttttggcttaaagaggagtgagccgataaatccgaaaataatcgcagccgaaatgccggaagatgtgacttcaaacatgccagtcaataccccgacaatgccgtgcctttgcacttcctgcatggcgccggttgcaagcgaattgccaaaacttgtaatgggaatggttgccccggcaccggcaaaatttacaagcggttcataaaggccgaggcctgataaaaccgcgccgaccgtcacgaggacactcatcgtatgtcccggcgataattttgcgacatcaaacagcaactggccaatcacacaaatcagcccgccaaccacaaaggcccagaaaaacattgcaagcattacgcatccttcctttcttacaaatactcgatggcgcaggcgtgcgcgatgcacggaatggtttcgccctgctgataagacaaaggcgacaatagtgcgccggttgcgacgagcaaaattttttggtatcggccttttttcatttcgtttagcaaatggccatacaggacaatcgctgaacatccggcaccgcttgccccggcatggacgggctgggacttgtcatataccatcaggccgcaatcctggaactgttcgctgcgaatgtcaagattcttctgtttgaaaagatcgagcgcgatggaacggccgattttcgccaaatcgccggtcacaatcaagtcatagtaagatggatcacggccggtttcccggagatgctgttcaatcgtatcgaccgctgccggcgccattgcagcgcccatattaaacggatcggaaatgccaaggtccagtacttttccgatcgtggccgatgtaatccgcggcgccggcccgttttcttccgtaccgaccaccgcgaatcccgcccctgtcactgtccattgtgcagtcggcggtttctgcccgccgtattcggtcggatagcggaattgcttctctgttgttgcattgtggctcgaagcccctgccagcactttttccgccccgccgtgattaatgatgaaagcggcaagcgccaggctttccatcgaagtggcgcaggcgctgaaaaggcccaggtaaggaatcgcatttgtccttgccgcaaaacttgtcggcgtgatttggttaatcaagtcaccggcgagaaaaaactgaatatcggtttccttaaggtttcgctttttcagggcaatgccagccgcttcctcgatcagtttgcgctgggctttttcatacgaatcctcgccgatccataaatcttcaaaaaaccggtcgaaatcgtctgctatccgcccctttttttcaaacgggcccccgacaacaccggttgaaagaatggccggacggttcgtgaaagtccatgtttgcgattttgcggccattacgatcccccccacatcatgaccacggtccgaatcaggacgacaacaaacgcggaaaacacaccaaatacaatgacggtgccggccagtttgaacatattcccgccgacgccaagcacatagccttccgtccggtgttcaatcgcagcggaaacgacggaattgccaaagcccgttaccggcaccgcgctccctgcaccggcgtactgcccgatatggtcataaatgccgaagccggtcaacagcatggataaaaacaccattgtggcggttgtcgggttgccggccgttttttcggtgaaattaaacatgtatatatagaagtaagtaagggcctgcccaaccagacaaaaacagccgcctacccaaaatgcacggatgcagttttttaacaccggccttttcatctcatgctttttttcgaactgatcatacgctttttgtacgggtgttttgttttgatttttgtttgccattgtctcagcccttttcctatgttaattcctgtttcagcttgatgatgtctttaaaacgtttttttgccttgccggctgaaattttgtgcttgtccatatcttccttcaggcggacggtttccaggaaaattttatagtcgctggaagtgataaatttgcgcccggggtagcgtttctttaaaaaggcgttgagctgtttttcgattttcttcattttaaaacggtgcagatgcctgactttataggcaaccaacgtttctttcggcccttcaatgatggccacatcgtaaatgctgtcaaagccgaggacatcttttttcaattgccctgaaatggccttattcccggtgttgctgagcctcaccggcgacggttgtgtttttttcacaagcgccattttgctgtccttgtgttccggcccgttaaaaccgcagccggagagcaaacatactgaagctaaaacatacatgatttttttcatactcatccctctgcactttcaacttttacctctctatttttcgcgcaagcgcagattttataattagaaattcttgccacatcctggaaaatggggaaaacaaaggcggaagtgcaatcctgccttccgccttagctttatcgcgtttttttgccaccgcagccgcatccgccttttttgacttttttctggttgtttttatacgccgggacggatgaaggggtgaccggaattttgatgcgtggtttgcccataatcttaccatcctttcctcaagattcgcgcttccttttttatcgtatgcggcatttttatggttgttcacttcattcgtccatgatccgcgaaaggacggtctcgaggaagcttgccaggccggcgattgcaaggatcatgacaacaggcaacccgatttgcggaaaaagcacccaacccccgtacaggatggcggcggaccagacgccggtgcaccagtggcaacttaataattcgccaatccattttctgatccctgttcctttaatttcaatatattcctctactgtgccatcaggcgctatttccgttatttctttatggaacggttttcgtaaaaaggccgtaattttatcataaaccaataagcgcgtcagcctgaaactggccagtgcaagcagaacgaaatcaagccaataggaaaccatttcctgcctccttccccggaaggatccggatgcaaaatgccccatgcaagttgtttgcctatttttgcaaaaacgcggggacattcgtaacaaaaaaagcactgagacaatattctatagtgtactgaaactaaaccattgaaggagttgaaaaatgaatgagcagtaaatcccatgaatattcccgtacttgtgtttgtgatgtcgtacaattcatcaacgatttgcaggatgctgcggtggaagacagcagctgcccgaccaactgcttgaatcccgtgctcggtgccaacagggaaaaacattcacatgtcaacacacgtccattcattctatatacaaaagacggttgtgcttttgaaccattttacaaaaatcaccactttgacagctgcgacgacttctgcgaaaaatcgaaatttttaagagtcgaaaatgtggaaggatgctgtgctgttgtacgggttttaaaatgtgtctgcgaacatcacgacggccattcaagggtccattttgaagtaaccgatacgtgcatcacgcttgatttaaccgacttcattgccattcaatgtctcgaagatacatttgtcaatttgtaatgtatgaaagtcgataagttgccgcttatcgactttttttccggggctttactggaccagcaatttaatgtccgtgatctcatccagattgatccagaccgtttccatggaagaaaaaggcatgacggacaattggtcttccatccgttcaaggatcacggcacgataggcggtgctgttcgtttggatcgtgacggggatttccggcagaaaccgcggcttatggattaaatagtcaattttttcatggactgtcatttctttaaaccgtttcctcgatggcggttggacggtttcttgttccggcaaagtgccggttgtgccagcgccgtccgtttcaaaagccgtttccgcttccaccgctccggcgggttccgcagcatttgccgcctgttgctgttccgcggcattcgacgctccctcgtgttccaaactatttgccgcctttgccatggccggaacaattacggctcccccgcgttccgcagctccttctgttttttcctgttctgacgttttatttggtatgggctgtccctgttctgctttttcctcctgtgccgctgtattgtttttctcttcggcatgccctgtatcgccgccggcaggcattggttccgcgatcgtcccatggacggcatgttcaggtttttcgctaaccacatttctgtacactttctgcattttgatcgcgagcggaacatttttcggctggataatataaagaagcggtttttggctgctgtactggctctcctccatgtttccaaaatccctcctctgatttctggctcgctttataactatgcgcggaaataagaaatgtgcctaggggcttggaatctcccaatcatttgatatttctgccttatcgtatgttttggggacaaggaacggaacagaggtttccacagcatattggcacaaattgataaagcaaaaaaatgtgcttttataagctaccatccgtctattccaaaaatatgcggatgagtagaatatattaacaaaacgaagggaggcatttaaatgtcttattatgactcaaacggcagctgctatgatgatcatcgccgccacaaacggcaagacgaggaagaacggggtcttctttcggaattcgatgtggatcagtcgccgtccgtacctgtacctgtgacaggcgtctttaacatggcaaacgccattgcggaagtagatgtaaaagtagatgattatgatgaccgcgtttcattgctcgcaactgtcgaatggtcgccggcagacctgccgcttggtgtaacacttgcagccttaattggagccgttacaggagcaggaacagggatcgtcattccgttaaccattccggcaaccttcagaatctggagaagaaattcttccggtacaacactcatctctcaaaaaacggatgaaagcgtggtttccggcatcgccattcttgcagccggagggcttgttaccctgctttttgaaaacgtgacaactacggttcacgccgtggataccgatccgtccaaagggaaaaacgaatacttcttaaccattgaactcggtacttttgctccagatacaacgattccgggggctgcacctacactgcttggaaccattacactgacgcctcaaaatgtcgtcagctacacattctctgctgcagaaattgaagataacgaccaatatcatgatgacaacaaaaaaggccataaaaaagattacagagactgatgccatgccaaaaaagccaggaagatttcacttcccggcttttttcacttacgctccggacaaactgttttcatctcacgttagcccataatatgatagccggcatccacatggatattttcgcccgtgatcgcgcgcgacaggtcactaaagagaaacagcgcggtatcaccgacttcactcgtatcaacaccacggtgaagcggcgccctttcttccatcactttcaaaatgctgttgaagtcgctgaccccttttgccgacagtgtgcggatcgggccggccgagatcgagttgacgcggatgttgagcttcccgaggtcatatgccaaatagcggacgcttgcatcgagggaagctttcgcaacgcccatcacattgtaattttccatgacgcgttcaccgccgaggtaggtaagggtgacaatgctgcccccgtttggcatgagttccagttctttcaccgctttggcaacggccgacagcgaataggaactgatattatgggccagtaaaaatccttcacgcgtcacgtttgtgtagtcgccttttaattcttccctgcgggcaaacgcaacacagtgggcaatgccgtcaatcgtgccggcttcatttttgatcgtttgaaagcatgactggatttgctcgtcgctttccacgtcacattgaaggatcagataatcctttcggttcagcgtttcagcaagttcgcggatgcttttttcattccggtcgagcgcataggtaaaaataatccttgcgcctgctgcatcaagcgattgggcaattccccaggcaatactgcgcttatttgcaactcccatcacaacaaatgttttattttccaaagataaatgcatcgtgttaactcctttattcacaatttatatgcgatttttagtacctgataccaattctacatgaacttttcgggtttgaaaagcacttgcgtttgatttgtttcgcgatgaacgtgccggggctccagggaaaatcaaacttttttcagctgccggcatttgttcaggcgcgccggacaacataaaatagagatggaaggagcgctaagcattgacccaaacgatcctaagaccattatccgggaacatcgcgaagcgtccaagtccgaacttgtattccgggctcgcccggaatataaaatcttatactcacttgtcaatgagcagaatgaactggaaattgacatccactttggatttaaactttttatacaaggagcgaatgtcgtgaaaatcgatatcattggggatatacacggctgcatggcggaattcaggaagctcacggaaaaaatggactatcaatgggaaaacggcattcccgttcatccggcgggccggctgcttggttttgtcggcgatctgacagaccgtgggccggcatctttggaagtggccgatactgtctatcgattgtggaaaaagaagcttggcctgtacgtccccggcaaccactgcaacaagctgtaccgttattttttggggagaaatgtccagcagaagcacggccttgaaacaacggtggcggaactggaggcgctccccgtaaaagagcgggaacggcatagcaaacaatttatggaattgtatgagaagtccccgctttatcttgttctggacggcggcaagcttgtcatcgcccatgccggcatccggcgcaaggatattggtaagatgaacaaaccggtgcagacttttgtgctttacggtgatattaccggggaaaccaatccggacgggacaccagtgcgccgcgactgggcgaaaaatgacgagggggaaggctggattgtgtacgggcatacgccggtgaaagaaccgcgatttagcggccacacggtcaacattgataccggctgcgtattcggcggcaaactgacggcactccggtatccggaaattgaaaccgtctccgtcccttcttcgatgccatatgtgggagaaaaattcaggacgttcgcctgaattttaaaaacatccataagggcataagcggaagcatgaaaatcttccgggtaccatttaaaggagatccaaaaagggcggtttagaaagaaaatgcatttctttccctgaaaccgggtgctgaaatgaaagctcactgcaatggagcgcctgacgggtgaagcggctcgtgtttccgccgtacaggccgtcaccgagaagcgggtggccaatataagaaagatggacacggatctggtgcgtcctgccggtgtcaagccggagacgcacatgtgcatatgccggaaattgccggacaacttcataacgggtgcgcgcaaactggccgccatcccggacttcgcgttctataatgctcgtctcttttctcccgatcggggcttcaatcgtgccgcttttttcagtaaaaaccccttccgcgagcgcctcatacgtccggaaaatttcatgtttctgctgcatcaggctgcataaatggtggatataacggttttttgcaaccaggacaagcccagatgtgttccggtcaagccgggtcacaacatggattgcggattcggtcccttttttccggtaatggccgagcactgcatttgcaaggcttgcggacgggtgctcgcgggaagggatcgtattcataaacgccggcttatccgcaacaagcacgctttcatcttcataaataaggccaaacggaatattttcgggcgtaagattggggctcggggtttcttttggaaaaacaattgcggccgtatcattcggctgcaatcgataacggaccgttacttcgcggccgttcacaaggatcagcccgccgcggaatttaatatccgcaagcgcccgtttcgagatatggcgcgcttttaaaaattctttcagttcctgatgtgcctcagcttctgtaattgtccacgataatgtcaacatgttttcacctaatccgaaataaaagaatcatgcaccctcttccagaaaggaaaaggcctgaaacgggcaaatcggatcttttcttttgccacacggtactggatggaccggacttccttatggagcagcgttaaatggtcaactgttaccaaaaaatctttctgccggaccgggcgcaacacacaagtatggtgccccggcaaaataagcggcgagccgattgtccggaacactttattgttaatggatgccatctcggtgagctggatcgattgcagggaagggtggacaatagccccgccgagcgccttattataagccgtactgccacttggtgtggcaaggcataatccgtcgccgcggaaacgctcaaaatgccggccattgatctcaacatcgatgacaaaggtgccgtccacgcatttgaccgttgactcatttaacgcaaggtaacgcgtttcgtggccgccgtgctcatacgcaatcatcgcttcaagaagcgggtagtccaccgtagtgtaagttttatgggcgatcgcatcgaccagctcctcaatttcatccggcacccagtcggcataaaaaccgagatggccggtatgcaccccgacaaaagccgtccggtcaagccgggaactgtagcggtgaaaagcatacaaaagcgtgccgtccccgccgaccgagatgacgatatccggttgtgcttcatcgtaaacaagcccgaaatcctgcaaataagaacggattttatgcatccatatattggattccgtatcccctttagaagtgatggcaaatttcaagctgcttcccctccccttcttttttgccaccggtttcatggctttttttgttccgcgcgctctttgttttttgaaaaatacatttgggcttcctgaatttcttcacggatctcggacatttcttcatcaaggcggaaagcggcttcggcagcccgcttcagccgtatattaatttcttcgggaaatctgcctttatacctgaatccgtgacgannnnnnnnnnnnnnnnnnnnnnnnnnnnnnnnnnnnnnnnnnnnnnnnnnnnnnnnnnnnnnnnnnnnnnnnnnnnnnnnnnnnnnnnnnnnnnnnnnnntttcgtcacggattcaggtttatacttatagtttaaagaatgttcaatcgttgcccaaaaattcatcgccagcgtccggatctggatctccgcaagaattttcttttccccgcggatcgtctgcaccggatattcaataatgacatgataagaccggtagccgctcggttttttattcgaaatatagtctttttcttcgacaatccggaaatcgtttcggcgcctgagaagcccgacaaccagtttaatatcatccacaaactggcacatcattctgagcccggcgatatcctgcatttccgcctccagccggctaagcgggatgccttttatgtttgctttttctataatgcttgctaccggctttacacgccctgttacaaactcaatcgggcaatgggtatgctctttttcaaattgggtgcgcatcccctttaacttcacttttaattcatcaacagcctgtttatacggggttaaaaattcctcccaatccactgcctgatcacctcttcggatctcattccaatgcaaaaacggcctctaccttatccagcatcttttttccgtaattgctgttgccccggatattatcgagcaaaaaatgaagttcctcatcaagccctgtaagctccaattttccatcttttgaaacagcaaccacttttttatgttcaaatgccgcagtccgaatctctttccaaaccggaacaggcaaatataaatatgtataatcctcacagccgtcgtcttcagccagatagataaaggcacaggcatccgaatcgacgatcatttgccctgccggcttcaggctccagatggaaacatccgggcgctcagcatacagttcgagaatcccgtctttccattcaggctgccccagttcaataatctttcgcaatccgttttccctccctctccttcccatcggagaacaagtttcaatcccattttattttaccatatctccacagagaagtatgtgtaaaattttataaaattttacacatactaatcttttttaattacgtaaaaaggctaataaaccaaaaaggtgttgacatttcaatattgtaaccccttacaaaaggttgaaaattttttaataaaactataataacgagaaaactttggtaggttttttaacaaaatttaaattaattttaataaattttatttaactttaatttagcttcagatcttccagtatttcatcttttcttctgttcctgtataatggatgaaaatcattttgtaggtgagcgtatgttcaaaaagcttgtctgttggttgctggcctcccagttacttgttttacttttttcttttttggtgtataagcgaatcgatttgcttagctatattaatacttcgtttacgatcggggcgcttttgattctttttgccgcgtcggttttaatggcgcggaccggtttttttgatgcgtttatttacgggtttcaaagaatgtcttccaaatttaacgagggggacgtccgcccgctgtcgaagctggttaccctgcgtgtttccgtgcctcttcttaccggggtcttcatgatggtactgatggcgatcgccctttttctgcaaagttcgtcctgaaatgccggacatataaaggctgagtcttgcatacaaacgggcactctagcggacagcggtttttgacatttttccttcttttcattataatgaaactggtatatagaagcgatgagaaagaagagtacatctgtttatggcatttcagagagtttgtggctggtgggaacaaacatgcctgcagatggaatgggctttcgagctccggagatgaacgggcggctacctcattagtttccggcgtacgccttgcgttaaccaggctccaattggcattggaactaagcggcccataccagggcacttagggtggcaccgcggatttatcccattcgtccctaattttggatgaatggtttttttattttccggaaaaatatcagtgttcgaggaggaagaaagaaaatgaggacgattttttcaggcattcagccgagtggaacgatccacatcgggaactatcttggggcaatgaagcagtttgtggaattgcagaacagctttaattgctatttttgcattgttgacgagcatgccattactgtgccgcaagaccgccttgaactccgcaaaaacatcaggagccttgccgctttttatttggcagtcggcattgatccagacaaagcaacgctctttatccagtcggaagtgccggcgcacgcccaggccggatggatgctccaatgcgttgcctatgtcggcgaattggaaagaatgacgcagtttaaagacaaatctgcaggaaaagaaagcgtatcagccgggcttctcacatatccgccgctcatggccgccgatattctgctgtacagcacggatcttgtgccggtcggcgaggaccagaaacagcatctcgagctgacgagggatttggcggaaaggttcaataaacgttatcttgaaatatttacgctgccggacatcaagctttccaactccggagcaaggattatgtcgctgcaggatccgacgaaaaaaatgagcaaatccgatccgaatcaaaaggcatttatctcgctgcttgacgacccgaaactggtcgacaaaaagattaaaagcgcggttacggattcagaaggcgtagtcaaatacgacaaagaacggaaaccgggcatttccaatttgctcgacatctattccaacttcagcggcctgtccattgaagagctggaacggaaatatgacggcgccggctacggtgcgtttaaagcggatctcgttgatgtggtgaatgaagggcttgccccgatccaaaaacgatattatgaactgattgaatcggaggaactggaccggatcctggataaaggcgcggaaaaggccaatattgtagccggaaaaatgctgaggaaaatggaaaatgcgatggggctgggcagaaaaaaccgccactaaaaaaagcgagttgcggatcgtttcgcaactcgtttttacatcagttcgcttttttcattgtgttccagttcccatagcttttcaaaaaagggctgccctttgatcatgttttcgcacaactgttcatgctttttggaccagcctgtttttgtttctgcataaagccgctcccatgcatcttcaaatggcataaactggatgtgttcatactgctccggacgccattctgtataccagtaccgcacttccgccgtatttttcgaggaataaagctgatcgagcgccataaataacaactgctttaattgccgttcccttcttgtcagcccctgcatgcattccggcgacggggataaaatatgatgttctttcggatggctgcggttttcaaacggataggacaccggttcatgcccttcaatcatttcatagacaagttgttcctgcctcggaatcagcctgcttttgcggatcggcagcgtatagccgatcgtatcaaccgccaaaatcccttttccgtccgtcacgacaaaacaatattccagctggattcgttcatggtttttgcgcaaaaccgccttctggaaaacatcattcagcaaagtttgcggcagttcagccaaatcattttcaatgtactcgtataaatgcgtgtccacaaataaaagcggcacctggtccagcagttcgatcacatcgtccctccgccactcatggaacggacagacattataactgttttcctccccctcgaaccagttgacccatatatcgtgaagatacagcatggataaccccccgtatactctgtttgtcattcagtataggcagggggcagttaaattattccttcttttccggattccgctgtgtagaaaatgaagattgcgcttcgctcgtaaaaagaagaaccccaatcccaccgcgtcgaaaaggaagaaggcctgctttaaaagacgcttcgttttcccacccccggcgagtcggaaaggataaaggccctgttttaaaaagacgccctgctctccctcccccggtgagtcggaaaggataaaggctctgctttaaaaagacgctctgctctcccgatcccggtaagccggaaaggaaaaggccctgccaaagacagggcctttatggattattcctgggtgtccgctttttcggatgtgacactcaccttttcccaatccgtatgtggatatatagccaagtttttcacgcggttgttcactgcatacaattgatagcggtaaacggtcgggatgactgccgcttcctcattcatatactcctgccattcattgtaaacctttttgcggtatgctgtgtcaaaagctttcggagaatgccctttttccagcaattcatcatttttcttgctgacaaagcgggtgtagttaaacatgacgttccgtccgtacaagccatacggatccacatttgtacctgttccccaggcacctgcatagatatccactttcgggtcatcttttttcaccatgtcatagaaagagttgaactcagcaaggcggccgtttacaagcttcacatttaagccgacatctttccagcattgcatatagaattttgccagcggctcggctgtatccccgccactcatggaaagaaagttaatgacgaattttttgccgtccggatcttcgcggtacccgtctttgtccacatctttataaccggcttcatcaagcagtttctttgcttttttcggatcatatttgtaccctttcgcggacttgtcatgccattccgggaaagatggcggaattaaagtggtcgccggaaaacgcaacccgtggtagattttctcgccgacagacttgttatcgagcgcatacgccatcgcctggcgcagttttttattttggaatttcgggttatccatgacgttttcctgtttctttgcatcccagtggccaagcttaaatccgatatagctgtaagccgaatcgatcgtgccgagcagctggaagtttttcgcgcttttagcggattcgtattggtctaccgggaaggcagcatagtcaatctcgccttttttcaaggcttccaataccactttcggattgaccactttgatgattacaccttttagtttcggttttcctgcccagtaatggtcattcctgacaagttcaacagactcgcctggaaccacttttttcactttaaacgggccgaagcctaaaggatgtaaacggattttgtccgactgcgccatttttgcgatcggcacatcttttaaatagtgttttggaagcggtgtcgtccagacgcccgttttttcggaagggttggcgctcttccaggtaatggaaattgttttatcatcgatcactttaataccggaaatgttcttggcttttcctttatggtattcatccatgccgacgatgttttgaaacagaggatcgccatagcgcacgccggtatagtctttattgccgatgaccaggtatgcaaattcgagatcttccgcggttaccggctttccatcagaccagttgacattgtctttgattttaatcgtcattgttttgttgtcattggacaatttgtacgtggcggcgccgtcattcgtaaattcatagtttttgtctgtttttaacagcgaatcttcaaaaaattgaatgacttcagcatccggttcccctttgtagaaagcagagttgaatgtgccttcaatcggcgtatcggaaacgatgccgtagttcagaaccccgccgtcaatggcttttttattgtttttgacggtagtcggaaacttgcttgctaaatcttccgtcttcactgccttgtcttctttgcttccgctgctcgatgaattgttgcaggctgacagcaccaatacgagcatcaccagcaaactgaatacgcttgaccattttcttttcctcattgctaagccccctcttttttatccttgtctttgtcttgcatcagctgcgcgttttaacgcctggccgataaaatttatacacagcatcatcaccagaatcaggagcgatgcaggtaaccaaatccaccatttatgctggagcacatccgggtttgtggcgtaactaaccaacgtcccaaggctcggtgtgctttccggcaacccgaagccgagataggtcaggctcgattcaatgccaatattgcttgccagattaatcgtcaagtttacgataataatcgagctcaaattcggcaggacctggaaaaggataattttccagtccggcgtgccgagcgtcttggaagcactgacatagtctagttccctttccgccagtgtcttggagcgaatcaacctcgcttttccgacccaaaggaatgcactcataatgagaataaaagaaaacacattatatttcggcacgattgtcacgaggacaatgatcagcattaaaaacggcaggacaagaataaagtcaatgattctcatgatgatattgtcaatgaccccgccgaagtaaccggcaattaatccgaccgcaagcccgatcgcaccggtaatcaatgtgatcgcaagcccgattgtaaacgaattttttgcaccgataatcagttgtccgaatatatcccggccgccgtaatcggtgccgagccagtgttcagctgagggcggcgcgtaaatggataaaaggtcaacctttacaatctcattttcgtttaaaatcaatgacatgccgtaaactgtaactagaatcagccccagcacgatcatggagataacggccattttatctttgatcagttcccgccagataatcgaaaatccggacgggcttttttctgtttcggcagttgcgggctgttgtgttgaaatgactgctttcatcctctcaccccccgttactcaatccggatacgcggatccacagcgcttaaaataatatctgataataatgtgccgaacaaagtcgccacgccggaaatcatcacgagcgccgtgaccacgctgtaatcgcgctgcataatggattgcaaaaacagctgcccgatccccggataaccgaatatcgattccaaaacgacggacccgccgattaatccggtaatctcataaccgaaaaaagtggcgatcggtaaaagcgagtttctcaaaatatggcgcgtatacactttggactcaggcacgccttttgcccgcgctgtttttacaaaatctttgatttttgtatcgatgatttcattccgcaaatactggatcgtgcccaccgttgcgagcagggatccggataaggccggcaaaatcagatggtacagtttgctcatgtaatattcaaacgtgccgtcacgggcctggatattgacgctgccgcttgtcggaaaccatgacaggacaaaaccgaacacaaacagcataatcaatgcaaagataaacaacggggttgcataactgagatagttataaccggttatcagcttatccgcccatgaatccgtccatctcccggccacgatcccaagcggaatggcgatcaaatacgtcaggatcagaatcaccgccgacagcaaaatcgtgttccataaccgcccggcaagcagttctgttacaggctgctggtgaatgtaagagatgccgagatcgcctttgaagagatttttcacccagcgggcgtactgcacataagccggatcattcagccccaacttgtctttcatttcatggagcgtctggacatccattttcggattgctcgccagccggccggtcagcgcatcgccgggcatggcctttgcaagcatgaaaattaaaatactcaaaataattaattgagggatcatgatgagaattctgcgcaatataaatttaatcataactgtgccccctctttacggcagtgcaacggaatgggtcggcgaaaccggcttgagatggtacggcttcccttcctcgtcaaaataatccctgaaagcctgccggaattcattgttgattttttcccgatactgtttttgtgctgttcttttttccggatctccgtttggaatcgcggacagcagccgttttgtgtagatatgttgcggattctcgtaaatttcatcgctcgtcccttcttccacaaaacgcccccggtacatgatgccgatccggtcgcacatatgacggataatgccaaggtcatggctgataaacaggtaggtgagcccgaattctttttggatgtctttcataaaattgagcacctgggcctggacagaaacatcaagggcggagaccggctcatccgcaataatcagtttcgggttcaatgtcagcgcccgggcaattccgatccgctggcgctgcccgcctgaaaattcatgcgggtatttaaacatggagtccgggctcaggccgactttttccatgacttcgcggactttttcccgctcttgttcgcggggcagtttctcaaaattgcgaatcggttcggcaataatatccgccacgcgctttttcggattcagggaagaatacggatcctggaagatcatttggatatctttccggtaatgttgaaattccttgcggctgagccgcgccaaatcggtgccttcaaacacaattttgccctcagttgccctgttaagcccgacgatcgtcctgcccgttgtcgttttgccgcagcccgattccccgacaagcccgtacgtttctccaggctgcagttcgaaactgatatcatggaccgcttttacatggtcgaccacccggcggaaaaacccgccccgtaccggataatagactttcagattttcaaccttaagaagtggcatgatacatatcccctgtctccgtgttcttttcgtccgggaaataaaaatgtttataacaggtacagcgcacccagtgtccgttttccacttcgcggagaaccggattttcttcatgcgccgcgttgctgatccagccaatccttgacttaaagcggcatcccgagcgcggcaggttcttcagtgaaggaacgatgccctggatgacatgcagcctttctttcgattccgttgcggacgggattgaattcagcaaagaacgggtataaggatgtaacggatttttgaagagtgttgtaacatccgcaatttcgacaatttcgcctgcatacatgacagccactctgtcggccatttcagcaacgacgccaagatcgtgggtaattaaaataatgcccgtcttcatctggcgctgcaaatctttcagtaaatccataatttgtgcctggatcgtgacatcgagcgctgttgtcggttcatccgcaatgacaagcgacggctggcaggcaatggcaatggcaatcaccacccgctgcctcatgccgccggaaagctcatgcgggtattgcttatacgtcctttcgggataagggatcccgacccggtttaacaattcaagcgtccgctttttcttttcggaaccggatagcctggtatggtaatccatgctttcctctatttgccgcccaactgtcatcagcgggttcagcgcggtcaatggatcctggaaaataatgcccatttccgccccgcggatttcattcagttttcctgccccgagcggcactagatcctgcccgttaaagagaatgcgtccttcaatttttgtcttttcttccggatgcagccccatcaccgccagggcaagggcgctttttccgcagccggactccccgacaatcgccaccacttcattttccttgacggttaaggaaacgtgatcgaccgccggatagtatgtatcctggatttggaaagaaacagtcaaatcctcaatttgcaaaagcagcggtttttccaatatgcaaacctcccttcttaaaagtagaaaacatcgaaaatagattaaaatcttattaatctattgtttagataatattacaaaactaaaagaaacgcaatgtctttttcaattaaaattatttttgtatttttttggcactttatggattcaggattccgccgggttggtaaacattccttctgcaaatatttcggaacggcggccgagagttgctattgtagaaaaggaatgggccgttttatatctctctatcaaatggtatccgagcgcataccccatcatcggcgggacgtatcttctgccgaaaagaaggtcatcatggattttttcttcttttccggctgcaagattttttttgaaaaactgttgccatgcatgttttttctgtttttcagaataacgtgttgaggtttccgatacatatgcttccccgacatactcgagcacagcatgttcggcgaggccttcaaatacgagggaatcgagcagcgtatagccgcgcggcggttttttcagcctgcccattcttgccgcatgatggtattcatggacaaacagcgcttcccattctttccggtcccgcaccggcgcaagaaacaaaaaaacggcatccggcagtgccacacccgattttccgcggctgcggccaaagttgaaaccgtttccattccgggctggaaaaatataaatgtccggatctggcccgttccaaagctttttgtattttgcgtgatactccccgatttcctcccaggcgcccgctttttttaatccggcaaaaacctgttccgcctgccttgaagggcggtacatgccaaaacgctgcaaatagcggtaaaaatcttcgggatcttcccttccctgtttaatgttttgtaaaaacagctccggttttgagaaagcttcttccatccacgcatccgtccgaataacccccatcgccgtttccccctcccgttgctttattttattgcgggaggccggattttagaaaataaatttttcaaaatccggggcaggctgccgcacgtcccggaacgcgttttttcaactgttaaatccatctttccgcatgcaaaaaagcatccccgaactactcaggcaatgccaaaaccgatggaatggcattcgatgcagccggtttgatccccatgcaaaaaacaaaacggggtcccttttcagagcgacttgttatttttaataacattttcgccacagcgttcacttaataagtgatttcgcagtagcgggtttcatttcaatacaaaaagggtacccctcatttaaccgggataccccttttggatcaggcttcgtattttttaaaagcaagggttgcgttgtgcccgccgaaaccgagcgagttgctgatcgctgcgttcagctcctgtttgcgcgctttatccggaacatagtccaaatcgcattccggatcaggcgtttgaatattgatggttggcggaacaatgccttctttgatcgcaagcacagtaaaaatggcttccacgctgcctgctgccccgagcagatggcctgtcatcgattttgtcgagctgacggccagtttgtaagcatggtcgccgaaaacctctttaatcgccattgtctcgtatttatcattatacggcgtgcttgtcccatgggcattaatatagccgacttcatccggggcaaggccggcatcatcaagcgccatttgcatcgagcgcgcgccgccttccccgccgggcgctggcgcggtaatatgataggcatccccggttgccccgtagccaaccacttccgcataaattttagccccgcgttttaaagcatgctctaagtcttcaagcaccaaaatgcctgcaccttcgccgatgacaaacccgtcccggtttaaatcaaacgggcggcttgccgtttccggatccggattggtggacagcgctgtattggcacaaaatcccgcaaatgccattcttgtaatcggcgcttccgtcccgcctgcaatcatggcatcgcaatcgccgcgctggatcgctttaaaggcgtcaccgatggagtttgttcccgttgcacacgcagtgacggtacaggagttaatcccttttgcgccaagaatgattgagacctggcctgctgccatatccggaatcatcatcggcacaaagaaagggcttacacgccgatatccgcgcttttggaatacttcaaactggttttcgaatgtttccatgccgccgatgccggaaccgatccagacgccgacacgggttgcattttcttcgttgatcgtaagtccggcatcttttaccgccatcagtgcagatgcaaccgcataatgggtaaaacggtccattttgcgggcttctcttcgttcaataaattcttcgatgttaaagtctctcacttcagctgccacttttgccggaaactgatccgcatccagccttgtcagcgggccgatgccggatttcccgtccagcaccgtttcccaggctgtccgcgcgtcatttccgaccggcgtgacagccccgattcccgtaacaaccactcttcttttttccattatgccatctccttttcctggtataagaagaccgtgtttcttacaatctgtatgctgcatttaagagtgttatcttccccatctgaccagtacggctccccaggtcagtccgccgccgaagccaaccatcaggatgaggtcatcctctttgatctttccttcttccagttcatccaccaatgaaatcggtatcgatgctgccgaagtattcccgtatttgtggatcgttttcgacattttttccaccggcaggccgagcctttcccttgcagattccatgatccggatattggcctggtgcgggattaagaaatcgacgtcttctttcctgacgccagccttttcgatcacgcgcaagctcgattcgcccatttggcggacggcaaatttaaacacttcacggccgttcataacaagatgcccatctttatcttcatacaaatattttccgcctgaaccgtccgaaccgagttcaaaagcaaggatgcccctgccttccgagaccgggccgacaaccgctgcgcccgcgccgtctccgaacagcaccgccgtactgcggtcttcccagttcgtgatcttggataatttctcaacacctacaattaaaacatatttatacgttttcgtctcaataaattgcttggccgtcgcaagcccgtacataaagccggaacaggccgcactgatatccatcgcggcagctttttttgcaccgaggcggtcctgcagaatattggagaccgtcggaaacggctggtccggcgtcacggtcgcaacaaggattaagtcgagttcttccgcggaaatgcctgcatgtttcaccgcttttacagccgcctcatatgccatatcggaagtctccatatcatccgctgcaatccgccgttcttcaatcccggtcctcgtccgaatccattcatccgacgtgtccatcattttttcaaagtccgcatttgttaaaaccttttcaggattatattttccgacaccgataatgccagcattcattttgtattccttctttcactaaaatagtcaaagcggcacaattccttatcgcacaatattatgacctgctcctaattataacaaagcactgtttgcttgtcacgaatagaggaaaatagtatgtgtcaagttnnnnnnnnnnnnnnnnnnnnnnnnnnnnnnnnnnnnnnnnnnnnnnnnnnnnnnnnnnnnnnnnnnnnnnnnnnnnnnnnnnnnnnnnnnnnnnnnnnnncgcgcctcaacatccccgttatccatctttatacggaaatattacatcttttccgaaaattacaccgagcaagtaaagcacggtagccgaaagtgtacaaaaagagtgtcttggaatacccgatatttaaaccttgtcgagaaaaacttgacacataccacagagaatagacactttaaggaaaggattcgctttagtataatgatgatggaagtgagggcttatcatgagcaaagaaattgaaattgaatgtaaaaatatggtcacccgctgtgatttctgccgccttgcccgggcttttggcatcgcggaacatgattttaaacagcagaaaaacttttattttgatacgcctgattttgctttaaagcgtagaaaatcggccctgcgtgtccggaaaaagacaggacgcttccagctcaccctgaaaacgccggaaaaaaccgggctgctggaaacaagccagatgatcggcgaaaaagtttttcaaaagctcaaaaacgagggctggtttccggaaggcgaagtcatggaaaaattaatggaactgcaggtggcaccaagtaaattggtgtattttggaaagcttgtaacgaagcgggctgaaattgcatatgaaggcgggctgctcgtgtttgaccataatttttatttaaacaaggaagattttgagatagaatatgaagtaagtgaactggaaacaggcacaaaacaatttttaaaattgctggaaacatacggcatcccgcaccatccggcaaaaaacaaggttctccgcttctatgaggcaaaaaggagcaatgagagatgagtacaatcagccaaatcgcgtttttgatggaactggaggcgctgcagtcgctttctcccggcagcaatgctgctcaaacgggcaacagcacctctctttttcaggagatgctgtcaagctttatggaaaatgcaacggcttctggcggaagcggtaaagacgcgtccggatcgttatcggccctggcagcagctttcaacctggcgttcaatccattttcttctttaacgggggaaaatccggcgcttgacgcattgcccgcctcaacgggattcggcacgctgtcgggtaaggaaacgccagctgcggcgcagacagggaccgcggccctttcggcttctgcccaaagctcagcttcagaaagcacgcagacaacagccgcttccgtcagtggcggaatcccggcgaaaatcagccaggcgatccagcaagcatccgcaaaatacggtgtcccggaaaagctcattcaagctgtcatcaaacaggaatccggttatcgtccggatgcagtcagtccggctggcgcagcaggcttgatgcagctgatgccggaaacagcggcctcgctcggtgtaagcaatgtacttgacccggaacaaaacgtggacgccggcacaaagtatttaaaatctttgctgggaaaatacgataacaatgcccggcttgcattggccgcctataatgcaggccccggcaatgtcgaccggtacggcggtattccgccattcaaagaaacacagcaatacgtctcatcgattatgaatcatttggcataacgattgaaacccgccgccctgtgcggcatttttttacggggaaatttctgaagctgatgaggggcattgcccggtcaaggctccacttttttgtctttcacctgccttatgaaggacatttcaatgtttggcggcgcatgttttgtccttcatcgacccggtgaaggacattaccacgtatacagccttatgatttgtctttcatcaagccgatcgcgcaggttttccaaatgaatattataactaacgcctgtttccacaagtcttaggaagttatgaaagtttgccaataaagcggattgtttgagttattgcggcccccttgataaaataaaaaacaaatggcagatatgtcgacaaaaattttaatgagcaaacctttccgtcgatttcaaatatacgcaagataaaaacgagataaaggagcagttattctatggtggaaaagaaaactgtgccatatgagatcattgggggagaaaaacttggccagcttgttgatgcattttacaagcgggtcgctaaacatccggatttaatcccgatttttcctgatgatttaacggaagttgccaggaagcagaagcagtttttaacgcagtttttgggcggccccccgttgtacacggaagagcacgggcatccgatgctgcgggcacggcaccttcctcatgaaatcacgcctaaacgtgcaaaggcatggctgtcctgcatgagcgccgcaatggacgaaacagggattgacggcgaattccgcgacttcttttttcaaaggcttgtcctgaccgcacagcatatggtcaatacttcggatgatgtgccaggtgacgcaaattgaaaaatatgattgatttgatgaaacattccagctgtttttcaaaaaagccgctggaaatctatgtttttatcgatccgctttgcccggaatgctgggcgctggaaccggttttaaaaaagttgcgcctcgagtacggcgtctatttccgcctccgccatgtactgatcggaaaattatccaatctgaacgacattccgaaaaaacgggaagccgttgcggattactgggaaaaaacggcgagccgcactggcatgtcctgcgacggcagtttatggatcgaaaacccgattacgtcgccttatatcgtgtcgattgcaataaaagcggccgaactgcaaggaaaaaaacaggggttgcgctttttgcggaaagtgcaggaactcgtctttcttgaaaaacgaaacatatcggatatccaaattttagtggattgtgcaaaaggcgcttccctcgatgtggacgaatttttgcaagacatccattccgaaagcgcagcgaaggcttttcagtgcgatttgaaaattacttcggaaatggaagtaactgaaagcccgtcgcttgttttctttaatgaacatattgaagatgaaggattaaaaatttccggactttattcctatgatatttacgtacaagtccttcaggagatgctgggcaaagatccttccccattgccgcttcccccattggaggaatttctgaagtatttcgggtttgtggcatcaaaggaaattgcggtggtgtacgatatgccggtccatgaagccgaaaaagaattgaaaaagctcgttcttcagcaaaaggttcggaaaatcgaaggaaagcacggctcattctggaaatatatcaactgacccttgtctctggcaggggatttttatatgtaaaaataggaaagaggccttgcgtttgcaaggcctctttcaacacgaacaaaggggatgggagaaatttttcacggtcaaacaaaggggtatgtttgcttgtgatcaacttcacatctatataatagcacccccctatacggaatgcaagtacttgttaaagtgttcacatatctgtcaaatttaaattttgcataccgcggcagcctgttcataaaatagcactgaacctgtataaacttgatgaaaggagactggatatgaaaaaatgcaaacttacggcccttgccgccggtttcttcgctttgttctgcctgaatctgctcgggctgatgaagcttctccccctttttctcacgtccccgcttttgttcgcggccatcttcgcgctgcttttgcatgttaaccgccgcaaccgttttaaaggatttaacaacaggcgccacttgtagtggcttaaaaaacagcgctgcgggcctacatctataaaaagtgtcccattttcatttatttccggtcccctacagccatgcggcggcggaaacagtgctgccgccatttaatcgacccataatcgtaatggcgccgccattcttttatccagcaagcaaattttccatatcctcactttttcaaagcacaccatccggcgcagaaactgtaccgccacccgcctatcatatgaaaggcagccccgttcttagaatgccggcaaataaattttccatactcgccaacttttttcaaaacatacggcggaaacagtgcaaaatttccgctggcttctttcgaaaaaaggccccatacgtcaaacagcggcggaaaaattccgccgctgtttctttatccgagcaagttttccatttccgttaatttttcttcaaatacttttaacgcatcttcgaccggctggggcgacgccatatcgacgcctgcttttttcaatacttcaatcggatattccgagctgccggcgcttaaatagccgatgtagcgtttgacagccggttccccttcttcgaggatttgtttgcttaacgcggtcgcggcgctgaagccggtcgcatactgatatacataataatcgtaataaaaatgcggaatgcgtgcccactcaagcccgatttcctgatcgatggcgatatccgtgccaaagtatttttggttcagcttataatactcatctgtcaaaagttccgctgtcagcgcttcgccatgttgcgctttttgatggatcagatgctcaaattcggcaaacatcgtctggcggaagaccgtcccgcggaaaccttccagataatgattcaataagtaaatccgctgtttctcgtctttgatcgtttttaacaaataatcgttcaacagcgcctcattgcacgtggaagccacttccgccacaaaaatggaataatccccgtacggatacggctggttcttccgcgtgtaatagctgtggacgctgtggccgagctcatgcgcgagggtgaacacattgtcaatattgtcctgccagttcagcaaaatgtacggattggtcccgtaagcgcccgaagaataggccccgctccgcttgcctttgttttccaccacgtcaatccagcggttttcaaacgcctgctgtaaaatgccctggtattccccgccgagcggatggagtccgtcaagcacgatctctttcgccttttcatatgtcacttccatatcggcgtcctggacaagcggcgtatacagatcgtacatatgcacttcatcaagctgcagcacttttttgcgcaaagcaacataccgctgcagcaaaccgagatttcggttcaccgtctccacgagctggtcgtacactttttccggaatgtggtttgccgcaagggcagcttcacgcgccgaatggtaatggcggatttgcgctacaacattgttctttttcacctggccgctgagcgtgctcgcaaacgtgttggtgaattttttgtaggtcgcgtacaatttttggaatgcctctttgcgcacgcggcggtctttgctttccagcaggcgtgtaaagcggccgtgcgtgatctgcacttcattgccgttttcatcgattactgtcgggaactcaaggtctgcattgttgagcatgccgaaagtggtgctggaagtattcagcacttccgaaacctgtgcgagcaatgcttcttcttccttagataaaatatgcgggcgcatttcattaatttcttccaatgcatgccggtacagctgaagcggcacataagcttccaggaattggttcagtttcgcttcctcaatcgacagaatttccggcaccacaaacgcaaacgcgctcccaacctgggcggcaaggcttttcgctttgctgtccatcccctggtaaaaggcattcgttgtgtcctggtcataacgcatatgcgcgtatgtatacagcttgccgaacctttccgtcacttcatcctggaactttagcgcatgataaagctgttccgcgctttcgccaagtttcccctgataagaagcggcaccggacagcttttcttttactgcttcatattctttattccagtcatcgtcactcggaaaaatatcctcaagcctccaagttaattcgtcagggacctcgttccggcttggcaacgcgtgtacttttttcccgttttccatcaattttcctccattcttctcaaaaaattccttcttttttcattttagcgtaactcccccaatcccgctactgttccgctttcccatttgaaacatccgcccgcaatgctgacgacagatggcgctccatatgttcaagttcttctgtattttttggcgcaaaaacatttttattcatatggtaacctgcttttccttttgaccagagccccaattgtacgagcagctgcgcatactcataaatcatcgcctttgccgcgttcctttcgcgcacatacggtgattttctgaattcaatttcctttttttccatcctcaccgtaaacagccgcagcagttcatccagtgaaaccgccgcatttgtccgcaatgcgaaaagggcatccagccatacataaaattgccactcgaccgggtgctgtttacaggcggccatgtgcaaaagcggcaggccgataaacggcggcagggacacagggtgcattcccgcttcataaacgtgccgcaaaaacgggtcttgaaaggcttttccaaactggatcttcaggccgatccagcgccgcctttccgcaaaccattcagggagcggaacaggggcggaaacaagtgaaaactgatcatctgtaaacggaaaagaaaaggcagacaacggcttttccgcgtaacatgcgcggaatgttttggcagatacgggcatcatgtgggacaagaggcagacctttcttttgccgggagcgtagctgaataaataaaagtggtgccgggtatggcgcaaaaaagacaattgaaaatcactgcaacggtacactctttccgcctctttccctggggaccggaaaggcatgccgcccagtatccaaacaggcaaaatgccgaggcgcctgtaccctgccgtcctctccatcagccgcccgaacgggatcggggaacactggtattcaatggcaaaaagctgccggtatttgcgcaccacaagatccgccctttgccggatagaaggaaaatattgttcgagggaaacatcgaggccctgccccctcaaccataaaaacaggtctttcttgccttgcaaatgcatcgggctttccggttcggaaaatgtggcacaagtggaatggcggtaatgggaaaaatggggggtgacatggctgccaatttttaaaatgaggggttcacggcaatcccggcagtaaaacgtatgggagttttttaactgctggagattcaatcttgtaaagcgttccgtcagcatgatcagctccccccgctcgttcagcgcagaaagcaacagcatcctctccttttttaacgtatcggggcccgttttaaacaccatccccgcttttgttgggccggcggcattcggccgtatgcagttgccggcctctctgcaagccccatattggccggcctgcatctccgggcccttatggcaaccgctgtataaacgcaatgcacagccgtattgaatacattcaccgctcggggcgaaaaatcctgtttgcccggacggcatttttccggataaacaaaaaaatcgatgcgtttgcggcaccgattttttatcgattaaaagtacgagtttaatttcgcaaatacattgctgttaatgatcagctttccgtattccaggagacggtggcttgtgacagaggaaaggtcggaatactccagcagctggcttaacttaaagtcattggcttcttccgtttcctcttccgggaagcggacatacagataatatttgccttcaaaggcgtacagcttcgtgctgacgtcttccatccgaacgtttttggccagcgccagcaaatcttcaaagtccttgaaatacaagacctgttcgagcggatcgccgtccgtgaaaacctgctgcatcggcgtttggaagttctcactgaagaattcttcaagctggtcgccgattggcagttctttcagcttttcgtccggaatcggcagctcaaaacgctgtccgtctttcgacaactgcgcttttgtgacaagcacttctagccctttttcgagcgcctgcacctgtatccaaagcgggccttccgggtcaaatacatcgtcatccgtgtgaatctcatccatcatttcccagaacaattcttcgcttctttcccgatcataccagatttcttcacgattaaacccgcgtttctctatatcaacgtacgaaatataaaacttcaccgtgttctcattgattctttcgatttccatacatcagctctcccttcttgcaggtgtagtgaagggacatgttcccccattcaggtataggtaaccttgtacttttattttatgataaaatactggcaaatggaaataaaaaaactttcctttttaaaattccacgccggcccatttcttaaacatccggcaaaaaaagatcatttgcatcttttttgtattgtatccgatttgctgcagaaattcaagacaaaattttctaaatacatattcattatttgacaattttatgacaaaaaggtgaagaaaacctcccgggccggaacctgggaggtgatttgccggtttaggattcgtatgaaaggcatccggcaaaagaaatgataaaagttgtcaattcacaagcctttgtgcttccctgagctggaatgtccgcactttccgcggcaggaagcggcggatttcatcttcattatagccgacctgcagccgtttttcgtccacgataatcggccgtcttaataaaccggggttttgctggatcaaagtgtataattcctgcagcggcagggcatccagatcaacgtttaatttttggaatgttttcgaacgggtggaaataatttcgtccgtcccgtcttccgtcatccgcaatatccctttaatttcatccagtgaaagcggttcagaaaaaatgttgcgttctttatactcaatatggttttcttcaagccagttccgtgcttttctgcatgatgtgcaacttggtgaagtgtataatgtgaccatctagcattcacactcctaaatttttatatttggattcccatttgattctcacattaaaataagtttaatcaaacaatctctattatgtattatacactatatccgcgttattgaatatatttttttgaaaaatagtttgttgtatttttccccggtttaatagtcttctttttccccaattctctctatttaaacccttattcttcatttttttataaaaaagcgaaaagaagaacgcacttcaaccggcatgcgttcttcttcccacttgagaatggtcagccattataagcttttttgtactgctcgagttccctttccgaacagtagacaaaatggtgcggcgccacttcgcgcatttttacttcttcgccttccttatattgatggacggacgggtcgtaaattttccgttgccgtgtccgttcatagtcagggtccggaagcgggatggcggatagcaaggactgcgtgtacggatgaagcggatggttatacaaatcatcggcatcggccagttccacaagcttgccgaaatacatgacgccgatccggtcgctgatatatttcaccatcgacaaatcgtgggcaatgaacagatacgttaaatgatgttctttctgcagttttttcaacaggttcacaacttgcgcctgaattgagacgtccagcgctgaaatcggttcgtcagcaataataaattcaggatcgaccgcaagtgccctggcgatcccgatccgctgccgctgcccgcccgagaattcgtgcggataacggttggcgtgttctttgcttaagccgaccgtttccagcagttcataaacccggtgcatccgttcttcatttgattttgcaagcccgtggatatcaattccttccgcaatgacatcggccactttcaagcgcggattgagcgaagcatacggatcctggaaaatcatttgcattttccggcggaactgtttcagctctttatgggacattttgtcatggacatttttgccgccatacaaaacttcccctgccgttgcattgtaaaggcggataatcgtccgcccggttgtcgatttgccgcagccggattcgccgacaagcccgagggtttcgcctttgtaaatatcaaatgtgagatcatcgacagcacggacttcatttgcccttccaacattgaaatattgttttaaatgtttgacttcgatcagtttttctttcactgccattttacttcccctcctcagccggtaccgggcgcacgttccctttaaacttgtacatccgctttttcacggcttccggcggctccacttttggggcgtccggatgcagaagccatgttgcggcataatgcgtatccgacactttaaacatcggcggctcctgctccaaatcgattttaagtgcgtacggattgcgcggcgcaaaggcatccccttttggcgggttcaataaatccggaggggtgcccggtatcgcgtacagttcttcatccttgacatcgaggctcggcatcgaactaatcagcccccatgtatacggatgttttggattataaaaaatttcatccactgttccgatttcgacaattttcccgccgtacatgacggcaacacggtctgccacattggcaaccacgcccaaatcgtgcgtaataaaaataatggaggtatcaattttggactgcagttttttcatcagttccagaatttgcgcctgaatcgtaacatcaagcgccgttgtcggttcatccgcaattaaaattttcgggttgcacgccaaggcaatggcaatgacgaccctttgccgcatcccgccggaaaactggtggggatactgtttgatacggatctccgcattcgggatgccgaccagttttaacagttcgattgcgcgttttttcgcttcatttttatgcattttctggtgtttcaaaagcggctccataatctgcttcccgattgtcatggtcggatttaaagaagtcatcggatcctggaaaatcatcgaaatctctttcccgcggatcgactgcatctttctttctgacgctttggcaatgtcgacgtcgccgaacaggatttgccccgacttgatttccgaattgttcggaggcaacagccgcataatcgatttcgtcgtcaccgattttcctgaaccggattcccctacgatggccaatgtttcccctttatataaatcaaaactcacaccgcggatcgcttttacttcaccggcaaaagtgtgaaaggatatattcaggtctttcacttgcaaaatcttttccattcggcttcacctcatttcttaatcgcgcattttcgggtcaaatgcatcacgcaaaccgtctgccagcaggttgaaggcgacgagcagcagacaaataatcgtgcccggcactgccatcaaatacggcaggaactggaatgtcttataaccgtcttcaatcaatgtcccaagcgatgcagccggggactggagcccgatcccgatgaaacttaaaaaggcttcgaagaaaatcgcacttggaatggtgaacattgtattgataataatcaccccggttaaattcgggagcagatgtttaaataaaatccgcatgttcgaagcgccaagtgtctttgctgccaatacgtactccatatttttcagctttaacacctggccgcggacgacccgcgccatattcagccagccggtgatcaccatggcaatcgtgatggaaaggatccccggtttgaaaatcagcagcattaagataacgacaatcaagttcgggatgccggacaaaacttcaataatccgctgcatcacgttatcgacctgcccgcctttatatccggatatgaggccgtaagaaacgccgatgatcatatcgatcaacgccgcaaggaaggcgatatataaggaaattctcgtcccctgccatgcccttgcaaacaagtcgcggccgagagcatccgtgccgaaccagtaatacgttttaatatggttttgttcgtacatgttcactttttgcccgccaaccgtctgggacccgtcaaaaatgccgagcttctcaatcacaggaattcttggtggcaaatttgcccttgatgaattttgttcatacgggcccgatttggaaagatgcggcccgatgatcgccatcagaattaaaataatgataataaacaaactgacaactgcgcctttgtttttgcggatgcgcatccatgcatcctgcataaaggacagttgcggtttggcaatcaattcactttggtcgcgatccggcgctgcgggttcaaataattctttcggcaatgcctctatgttgttgttcatgatttattccccccggccaatcgaattctcggatcaatgataccgtataaaatgtcgacaactaatgtaatcaggactaacaggaatgaaaaaaagagggttgtccccataataatcgggtaatcattcatttgaatggatttaacaaattgttcgccaatcccgggaacagcaaaaatttgttccacaaccatcgatccggtcatcaagttaacggcaagcggcccaagcaccgtaataagcggaatcagcgcgttccggatcgcgtgcttaaaggcgatttgcccgtaagaattcccttttgctctcgccagcgtaatgtaatcggaaccgaacacttcaatcagctccgttctcataaaccgtgcagctgttgcaaccggaaaaatagcgagcgcaatggtgggcaatatggaagaggcgaacccatcccaagctgcaaccggcagccattgcagtttcgcgcctatcacatattgcaggactgcggcaaatacaaacgagggaatggatataccgaggaccgaaagaaatgtgcttccgtagtcaatccatgtgttttgaaacattgccgccagtacgcctagtaatatgccaattaacgtgccgacaatcatggcctgaatccctaactgcaaggacggtcccatcctttccacaatcagctgcgtaaccggctggttgtcaaactggaaagaaacaccgagatcccctttcagcaaattcaccatatagtttttatactggacaggcaaagattcattcagcccatatttctggttcaggatatggacctgttccggtgataatttttgctggttccggaacggggtccccggcaaaaatttcatcaggaaaaacgtaaaagaagcaataataaataaggtaatgcacaaataaataatcctttgcacaatatacttcgtcacacgtgacacctcccaaagaaaaggaatgtttaaatttttcacataaaaatccgcttaacggtgaaaagagagtatttcggaaagaaaatactctcttttacctttttaattgaagtcatgcagttttcttacttttgcacatatgcatctttaaatgtgtaatccggcccgaatatatggtattcgattccttttacatacggtttaacaaggcgtaatgtagcacgttgataaatcggcccgattgccgcatcgtccatcaggattttttcagcttgcagcatgatttgccaacgtttttccggatcattgccgtatttgttcttcgcttcatcaatcagcttatcgtattctttattcgagtagccggaattgttgttatccccgtttgtgacaaacaagtcgaggaatgtcatcgggtctttatagtccggtccccatgctgaaacttgaatatcgtagtcctggttagtatccaactgcaggcggtttttgaatggtacatttttcaatgtcacttttaaaccaggcaagttcttttcaagctggttctgcatgaattccagtgttgatttagccgtatcggtatcatcagataaaatttcaaatgacaatgattttgtacctaattctttcaagcccttttcccaatatttctttgcctctgcaggattatactggaggtaagaaccggattccgtacggaaatctttgccatttttcggatcttttgcaaagtcttttggtactaagccgtttgcagggaaagacccgttagatagcactgtattaacaaatgcttttctatcataagccattgaaagcgccatccggatatttttgtttgccagagcggttttctttccgtttctgacttcattgtatttgaagtagaaaacagttgattccggaactgtcacagcttctttgttgtttttatattgtttcgcgtattcagcattcaaaacagtccggtcgattttgcccgtattgtacaagttgaccccggtacttggcgatttcacaacctggacattgatctgtttcagtttcacatgtttcttgtcatagtaattcgggtttttcacgtatttccatgtcaggcctgtgccgttccagtctttcaacacgaacgggccgttgaacaacatattgtcgctatttgtcccgaacttgctgccttttgactcaacaaatttttggttgagcggcagatacgtgccgaaagccagcaatgattttaagtaagggaccggtttttcaagctggacttgcaatgtgtggtcatcaaccgcttttacccctaaagtgcttggatcttttttgccggcaatgatatctgaggcgtttttaatgacacctccgaaaatataggcatattgtgagcctgtcttcggattcacggccctttgccaggagtaaacaaagtcttttgccgtaaccggatcgccgttggaccatttcgcgtcttcgcggagcttaaacgtatacgttttgccgtctttgctgactgtcggttctgctttcgcaatcccgagcttcagctcatcgtttttcccaacgacataaaggccttccattgtattaccgaaaacggtaaagcttgccacatccgttgcaagtgtcggatcccctgtcggaagttcagccgattcatccatattcagcacttgcttggttttggatgagccgccgcttgagcctgaactgctgtttttgcttccgccgccgcatgcgccgaggacgagcgacagagcaaaagccagcatcataaacacataaaattttgacttcttcatcagctaaccacccttttttatttttctgaaaagcgagtgacttttcgaatttaattatactaacatttcacttgcttgtacatattttttaatcttttgtatgtgtcaagttttnnnnnnnnnnnnnnnnnnnnnnnnnnnnnnnnnnnnnnnnnnnnnnnnnnnnnnnnnnnnnnnnnnnnnnnnnnnnnnnnnnnnnnnnnnnnnnnnnnnnaaaattttacacatacggaaaatacggtacatgcccacaatggcgggaggaaaaaacgcgctgccaaaagggccaggctgcgcggatcacatggtgcagttttcctccggcagcgatccgggccattgatgcaagccgatgcgtttttctgtcatatgctgattatagatccggaccgcccccatcctggcaaaaaaggaagaaaggaagtgagaaaatggaagaacatgaaaaaatccacccttttgaccggatgtttttcccgcaaaagcggcaagagccgcacgggcccgggcaggaagaagcagatgaagaaataagcggcggcctgtttgaccttgcttttttccggaatgtggatattgaagcattgctggaccaagctgacaaagtcgttggcgttttcgaggagtttaagccgttgttccggaaaatcacgccggtttttgagaagtggctttcccattttgaaaaggaagattagccttctttagctgttcttccgttggcaggcgatttgctgttgaattgcggcctgccaggaaacggacggccggacgatcatcggttcccattcgtctcttgcatcaagcctgcacgaaggaagcgggcggctgcctgtatcctgcgttaaaaaccgggcgataggctcccatccgtttccgtcagggctttttaaataaaagactttccccgtttcccttttttcaagcccggagacaatggcccctgcggcatctgctgcaaaaagggcatcgcggtcgtcatattttaagtccggttccggattcccgttgatcatttgggaaaaagcaaggctcccgggctggccggggccgaacagtgccgggacaaaaaaggtaacgcgcgcacaatcgcctagcatgccgggaacccattctgtctgttccgcaccagccagatggtttggaagaatgagcgccacacattcgatttgcgctttaatcggctctaaaaagcggcacgcatcctgtaaatcttcacaggcatcccggacataataatcgtataccggaatgcagcatgtgcatttttccggcgacaaccggctcagaggctggtattccaaattggcattcctgccgatttccatccatctttcttccatcaaaaaaccgggatccgtttcttgatcagccgctataaccggataccccgcatcaagcagtgccttgcacagctcaaatccgaaaaacgccccggcaccaatgacaagtgcttgattcatggccggccctccaatcgtctttcttcaagcatatgcttttcccgccgtaaagatacttccggacgatccgaaacggacaaaaggccgctgtgcccattttcccggaatccgttccatccttcgggaaaaaattcacccacggtaaccgggtttcccttttccaatggctgcggctgtggtaagataaaggatgatttaaaaagagttttttcaatcggggtgaaaaaatgaaatacatcgttacgattttttgggtgtttttactgagccaaatgctcggctacgttggcagtgccatgtcaaattcagaatacagcatgaaaacgatggccgttatgtcgcttgtcctttctgtcattgcatttattgtccatgcagcattgccgaaaaatacaagtgccggacaataaatcaaaacacccctcaccggaaaccgggaggcgctgattcgcagtgtctcccggttttttttcatcattatccggttgtcacttgaagcgcgccgtctttcacatcaagcgtgacggtttgatgcggcttgacctttcctgcaatgatttcttttgcaagcctcgtttcaatttgatgctggataaaccgtttcagcggccgtgccccgtacaccggatcataggccgattccgcaatccattttttcgcctcatcggacagctgaagctcgaccgattgttcagcgaggcgtgcagccaattcgtgcatcattttatccacgatacccatcatattttccagcgtgagcggcttgaataagatgatatcgtcaatccggtttaaaaattcgggccggaacgacgcgcgcaactgtgccattactttatttttcgtctcttcgctgatttcatcgcctttgatatcaagcaaataggacgacccgatattcgaagtcatgatcacgatcgtatttttaaaatcaaccgtccgtccctgcgaatcggtgatacggccgtcatcgagcacctggagtaaaatattgaacacttccgggtgggctttttcaatttcatccagtaaaatgacggaatacggtttccgccgtaccgcttctgtgagctggccgccttcttcatagccgacatatcccggcggcgccccgatcagccgcgagaccgcaaatttttccatatattcactcatgtcgatccggatcatatgattttcatcgtcaaataaatgctgtgccagcgctttggcaagttccgtcttcccgacgccggtagggccgagaaaaataaaggatccgatcgggcggtttgggtctttcatgccggctctggctcttaaaaccgcatcgctgacaaggcggacagcttcatcctggccgatgacgcgttcatgtaaaatgctttccagctttaacagtttttcgcgttcgctttgcacaagttttgcaacggggatccccgtccagcgcgcgacaatcgctgcaatttcttcttctgtgacttcttcgcgcaaaatccggccgctgccttctttttccgccatttgctgttcgagctgttttaattctttttcaacggccggaatcctgccatgccggagttcagccgctttgttcaaatcataccggttttccgcttcttcaaggtcgcgccggtatttttcaagcaattcccgtttttcctgtactttttgcaattccgctttttcagcctgccatttggcgcgcatccggttcgcttcttctttcaaatcagcaagctctttttgcaaaatgccaagacgggctttgcttgcttcatccgtttctttttgcagggcggcttcttcaatttccagctgcatgacgcgccttgtcacttcgtcgagctccgtgggcatggaatccatttccacacggatgttcgcgcaggcttcatcgacaagatcaatcgctttatccggcaaaaagcggtcggtaatatagcggtttgataacgtggccgcggcgacgagcgctttgtcatggatgcggacgccgtggtggatttcaaaacgttcccttaaccctcttaaaatcgaaatcgtatcctccacatccggctcctggacgagcacttgctggaaacggcgttcgagggccgcatctttttcaatatactgccggtattcgttcagggtcgtcgcgccgatacagtgcaattcaccgcgggcaagcatcggcttcagcatattgccggcatccattgccccttctgttttgccggcgccgacaatcgtgtgcagttcatcgataaacagcaaaatctgcccgttgctttttttgatttcctgcaataccgccttcagccgttcttcaaattcccccctgaacttggcgcctgcaacaagcgccccgaggtcgagtgaaaaaatggttttgtcttttaagccttccgggacatctttcctgacgatccgctgggcaagcccttcgacaatggccgttttgccaacgccgggttcgccgatcaggacagggttgttttttgtcttccgggataaaatccggatgacgttccggatttccgcatcccggccgattacagggtcgatttttccggctttaacggcttcaacaaggtcagtgccgtatttttttaaaacattgtaggttgcttccgggttttgcgaggccactttatgattcccccttatgtttttgatcgcctgaagcagttgctgtttcgtgattctgcttttcaaataccgggacaggtcatcatgttcgacatccattacagccagggccaaatgttcaaccgaaatgtactcatcctggagcgcgcgcatttcttcttccgcgagtctgaacagctcgataagcgccgcagacaaatacggggcgctttgcccggtcacttccggctttttcgcaagaatcccatctgctatttttctaatttcttccttacttaacccaaggccgttatatatctcgggaagcaggctgtccggcttttccattaacgttttccataagtgggcaatatccagctccgggtgatgtttttgagcggccagctgctgggcttccgccaaaccttcctgtaccgtaaaagtcatgcggttgatatccatccattccacctccgctatggcgcgtgccgtttaacgcagcgcgggcgcctatccttattttaccgtttttcctttgacggcagcaaaaaaaacagggatttctccccgtttggattttaagatttgcgtttgcgcctccaatggcgggcatcgttcgttgtttccggaaagcggtcgcctctgtggagatgggcgcttttcgggtttacgaccgggtcgccattttcgccaacttctacatacaccccgttattcggtgctttgcttccgggatgaaacaggttgctttgccccacagtaacgcccccttttttcatcgtcagcattagtttgggctaatctttttaaagcatgagcgcttatttttgccagtccaaaaatgaaaacggcaaagaggggagcgctggatcagttaatcccgagcgcaattttggcataacgcgacatgcggtcttttgtccacggcgggttccagacgatattgacatgggtgtcctttacttccggaatgtcctgtaccgccatttgcacctggtcaacgagaattcccgcgagcgggcaacccattgcggtcagggtcatggtcaccgtcaggcagccttcctcatccaggtcaagatcataaacaagaccgaggtttacaatatctatgccaatttccgggtcaatcacttgttcaagcgcgcccataatattttctttcaaagcttcatccatggttttcaaacctcctcgataactatcataacaaaacggcatacaagataaaaatgctttacaacaggtttttaagctgtgaaaatgttatattatttagtataatggatcgtcacgaaaattgcatgtaaactgaatcattttgagaaaaaggagaaaagccaaatgcctcaaccttatttaattgcattggatcttgacggcacattgttaaatgatgaaaagaccatttccccgaaaacaaaatccgttctgcaaaaaacaatcaaagccggccataaggtcatcatctctaccggccgccctttccgctccagccagccgtattatgaagaacttggactcgatacgccgattgtcaatttcaacggcgcatttgtccaccatccgaaaaatacgggcttttgcatctaccatgaaccgatgccgcttcaagtggcaaaatcgatcgttgaaacatgcggcgatttccggctgtataatattgtagcagaagtgaaagatgaggtgtacctccattatcacgacgaaaaactgctcgacatttttcaaattggaaacccgcatgtcacaaccggaaatttaatgcgctttttaagagatgaaccgacgtccatgctgatccatgcagcaaaggaagacgtgccgtcgatccacagctacttaagcgacgtccatgccgaagtgatcgaccacaggcgttggggggctccgtggcatatcatcgagatcattaaagccgggctgaataaagcggccggcgtgaaaaaagtcgccgacgcatacgggattccgaaagaaaggatcattgccttcggggatgaagacaacgacctggaaatgattgaatacgcggggacgggggttgcgatgggaaatgccattccggccttaaaaacaatcgcaaatgaaatcaccctttccaatacggaagacggcattggcatttttcttgaagaagcgctgaatttgaaagccatctcatgaaaaacgcataatcagcgccgggaattccaacactataaacgggcgcggcacccccgtgcacccttcccgtaaaggcggtgtttcgtttgggcagaagcagcaaatcgaaacgttttgtccatcagggaaaagatgcagtgaagaagtatagcgagcgtttcccatatcactccacattggccgaagcagaagcgaacaggagcgaagaaggcattccgggaggcattttataatggcgaaccgactgtttcaagaggccaggcaatttgtcgaactggcgaaagagacggctgctttcggaacggaacaagaaaagaataaaatggttcaaaaagcgaaaaatgctttatccagtgcatatgccaacacgacacttgcagaaaaagcacagctgcgcgatatgcaacaggaacttggaaaattggaatagctgccgaaacccggcagctattctttttgtgcatgtggttttgcttgttgccttctgcatgcggttttgcttgttttcttcctgaaacggattttcttccatccgctccccgatagagccccggaatttattttgcctcacttgaagcaactggtatgtgtaaaattttannnnnnnnnnnnnnnnnnnnnnnnnnnnnnnnnnnnnnnnnnnnnnnnnnnnnnnnnnnnnnnnnnnnnnnnnnnnnnnnnnnnnnnnnnnnnnnnnnnngtaaagcacggtagccgaaagtgtacaaaaagagtgtcttggaatacccgatatttaaaccttgtcgagaaaaacttgacacatacaagcaactgcttgaaattgtgcaaaacagggaaaatcggtaaactaaagacaaaactgattgtgagggtgaaaatgatggggattcaaatttttgctgacagtgcctgcgacttgccgctgtcttttttcaaagaaaaccatgtacacttgattccgttgaccgtttatgtagaggacaaatcctatgacgacctagtcggcattgacccgaaagaagtgttccgtttgatccgtgcgggggtgggtacaaaaacttcgcaaccgtcaccgcaatattttgaaaaactttttaccgatcttgccaaatcgggggacaccggcatttacctggctttttcgtccgagctgtccggaacgtaccaaacagcggccatgatcgccgaacaagtgaaagaagcctgtcccgatcttgatttaacggtactcgatacgaaatgtgcttcgatcggttacggcctcgttgtaaaagcagccgccgatttacgaaaaaacggggcaggaaaagaggaaatcgtccgtgatgccgcattccgcagcaagcatatggagcatattttcacagtcgccgatcttgattttcttgccagaggcggcaggctatcgaaaacaagcgcatttttcggcggcctgctgaatattaaaccgatcctcgatgtagaagacgggaagctcattccgattgaaaaaatccgcgggcggaaaaaactgctgcaccgtatgctcgatatcatggaagaacgcggcacggaccttgaacaccagctggtcggcatctgccacggcgatgatgaagcggctgcggaagaaatgaaacagctgattgaagcgcgtttcggcacaaaacaatttttaatcaacacgatcggcgccgtgatcgggtcgcacgccgggccgggcgcattatccgtctttttcctgaatgagctgccgtaacgccttccaacttttttccaggcataccggttaatagaaattttggacgggtatagactaatggtgatggccggccaatccaaattccggattgccgttccgtttaaaaattgaacgaggagtggtaaaagtggcgaacgaacaaaatgcttccatgaaaactttgcccgcccagcaccagaacaggcagcccggcacagaaacggaaatgaacccgcagccggaaatcttgcatccgacgactcaagctatgtgaccgggcaggtcatccacgtaaacggcggcaccgtgatcaacgggtgacgcgcaccggaagggcacagccctttccggttttctttttgcttaaaacagagcacaaggcaccggggcacgtgtttccggcccaaagcctgccggttatcacaaattcttttgcttaaaaaggatgtaaagtccaagggggtaaccgggatggtgcagatgtttgccgcctaaaccaaaagcttcgggccctgttttctttctgcttaaaaaggtatgaaaacccctccccttgtcaaaaacagataaggaaatgatgctcgggaaggagggccgcaaatggacggacagttcagattaaaaatcatggaatgccagtcccgcgcttttttaaccggttcaatcgagaagctgaatgaagaatgggtattttttgatgatgtatcggatgaggcatcgatgctggaggagtttgttggccaaaaaattgaaatcttccattccgggcgttggaaaaaaggcctattaacagcggatgaaaccgtcatgtcggacggagaaacgcttcttcttgaagaaaaagcaagcttgcggattccgaagcctgtcaatttttcgcttgagatgctgctcggagaatgggaggacggcctgtttcaccgcttcgtctctttcttaaacggggcaggcttttccatttatgattgcatctattgccataacgtattgtcatttctcgccagccgggagaaaaaagaaggcgtgaatttcatgctgtttgataacggggagaccattttatctgtccaccaccatttccggctgggcgaaacggcggacgaatggttcgattgcacatggagtgacggaaggcgtatgcttttgaaaaaaatgtaaaaaggaaggcaagacgacccttgcctcccatttacattctaataaaaaggatgccatcccatcggcaggcgcagcccgagatacaggacggcggcgaaaaagaggatcagcaaaacccagagcatccccgtcctttttcttttagcaagccgcagcgtaatcatttccatcatcccgatcacgagaatcccgccgagcagtttaaggccgtacagggcaggatcgagacgctggttatggaaaaagagcagcgcgcctgtcacgatgacgagtatgtaaaacagccttaaaaccatctggaccgttttaaacgccttttctcttcctgcgcgatggaggaacaaggccaaaataaacaaaaggatcgcaatgacccatgttgttacatgcgcatctgtccgggttaacatcgttcgatcttctcctttgcttctttatctgtcttatacccatcttactttatttgatggtgtttcgcaaagttcccaccttttcaaccgtaatttcaacctcatcacccggattcaagaaacgcggcggatgaaacccgttgccaacgccggcaggggtgcccgttgcaatgatatccccgggtaaaagcgtcatccctttcgacaattcggacaggatctcctcaactgggaaaataaagcgggatgtattggactgctggcggacttccccgttaacttttgtcacgatatcaagcgcattcggattttcaatttcggaacggtcgacaatccacgggccaaccgggcaggatccgtccaggcttttcccgataaaatattgtttatgcttccgttgaagatccctcgctgtgatatcgtttaaaatggtatatccgaacacatgggaaagggcattttcttttgcaatctgcttcccttccctcccgatcacgactgccagctccccttcgtaatccaattcgcgggtaaccgcccggtgcgaatcaaccggcgcttcatgtgcattgacagttgtcgtcgcttttgtaaacacgataatatgttcaggaatatcttccgcgctccccatttcaatcgcatgttcccggtaatttttgccgacacacaacatgtttctcaccgggtccggaatcgggggaagataggaaacctcgcgaagcggaacgagtgcgccttcaagggttgcttccggttttttcaattcttcccggacacggccggtaaacgcctcgcccgcccggatgccttcaagcaaagatggcggaaaatcattatccaaagcccgtaaatttaaaatcgttgtttcattataaagcacaccgtattgtacctggtcttgccaaacaaagctcatgaatttcatcgtatacacctcatccttttttgtcatttcgataactgagttgccgccagccccattcaagcggcccgtagcggaagcgatgcagccaaatgtcggaaaccagcacttgaataagaaaaaacaaaacaacaagcaataccccgcttggcacagacaactttccgtaaagcccgagtccataagcgtaaaagatcaaagagcctaaaccagactggctgatgtaattggaaagcggcatcctcccggccattgcaaccggcctgagaaaatccgccagccggtgcttcacacagagctcaacgagtgcaacataagcaccgcttaaaacggcgccgccgatcgtctcccggatatacagaaaaggcaggatgggggcggcaataagcggcaacagtttgcaaaacaggccaaaaacaaagcagcagcaaaaaaacagcagccatttttttgccggaatcctcccctttgtaagccagccttccctgcaaacgcccgcccccgccatcatcagcggaaaaactgacagaaaagcatgccatgtgccgggagggccgtataccgcataccagtccagccaccttcttttcgtaatgtccataaagctcccgtttgcatacacctgcaatgaagcggcggcattgcgccagtcggtatacaggagtgaagcgtccggcgaccggatggccatcaccatcagataaaagcttatgagtaaatgcgggataaaaaagagggcagccccgccaaaaatcaaagttttccctccctgtttcagaaagggcaaaagcatcatgccaaagaccgcataagccgctaaaatgtcccccggccagatgaaccatgcatgggcaaggccgagaacgagcaaaacggcaatacgccgaaaaagaaacttgtaaacctgcacccccgccatttccgcccgctgtttctgcagcatcagcccatatccgaaaagaaacgcaaaaacgggataaaaactggactggaaaaacacctcaatccatgccacgattgcccggtcccccgctttgaaccagtcatacggattaatataaagataaggagacagaaaagaaagcatatttaccatgagaatgccgaaaagggaaaatcccctcagtatgtcaattgcaggattccgccgtttttcacggattggcgcccattcagccattgcaacgctccttttttgtttttgcccgttaggcggatgaatcacccttttttcgtttttttcatacaatgaagcatgaaaaagtcaattgccactgaccaaggaaggatgtgcgcgccatgcccggttttgtcggcgccgtccaaattatcagtatcggatcaagcggcgtctttaatgtcggtgacgtattcctgattcagccggttgccagttccaaaacgtttgccggggcggggtcctttaacaccggtgaaaacctgtccattacaaactaccagtcaaatacaaatacgtatgattttgatgccattgaccagggaaacaattttaatttgtaacgggtgaaaacaaatgaatttttacgtgcaacaaagtatccacatccgcatgatcaagatcggcggcattacaaattcttccgtctttcaaatcggcacgtccggcatcatcaagccggcagcttatttgtataataccgggaatttttccgcgccggctccttctgccgctgcagaccagccttataatccgaatgtgacagtttccatgcagtccggcgctgccgcttcaagttcaagatagaaagcactggcccggttttcccggcgttgtgctgaaaccggtatttctttccggccacatttagacggcagcaacttcaggtatgtacacgtgtgctgaacctgcatgttctttccggaccctgcgccaggttcagcattgacgctgcacaccgatgctttgctttaagctcaggtttcgttccgatccaagccggcggtcactgtcgggctttaagccagaagggggtttttgaatgccagacctttttgccgaactccggcagctttaccaatactttcaacaccatgaagcgaagttggcgaaaatggaaaagacgcttgcctccctcatggaggagattgagcagctgaaagcaaggccgcctgtccgggtggaccggatcgaatatgcatttgaccagctgaaaattgaaacactggatggcaccttgaatatcggcattaatccgtctgacctgtccagtatagaggatgcagccatcccccaaacgcagggcatcccccatgccaacaatgaacaccgtgctgctttaaaacaggcgcttaccgaaaaactggtggaatatttggaaaaagaactcccaacaacgatcaccgacaatgagcggcaattcaaagtccgtctaaatcaagaatatcataattttataaaaaatgacttaaaaaaccaacttccgcagcgcattgattattatatcaaccagctcaattcaaccggacccgttgaaggcgaatggtttgacaaattgctcgggcaaatcaaggcggatatggcgcatgccgtacaagtttttatttcccatctgccgccgcaaatgaacggaggtgccagcgatggaactgaacgtcacaaaccgtgaaatctgtgtggattatgtccaaattatcggaatttcaagtgcctcggttttcctcattggcgatacggaaacgattcagcagggagcggcctttgatacgccgccggaatccctgattatcagcccgtacgtgccgtttgtgccgaggggatagcagaatgcaaagaaactcctttgtggatacgctccgggtcaaaaccgtcatatttggatcgaacgttattgttggagactccgagcggatccagatgtctgccaccgtccttgcgatccagcgccagcaggaattgtactacggatttgaagcgccgtttcaaacttttcccattttcagcctggccgttccgattccgccggtaacagaacaaatccggtttcaggtttaccaagaaaatccggtcataaaagtttcgaatgtagatatcatcgggatgtcgacttcaaccgtcatgcaaatcggaagcactaaatcaatcgcccttgaagcaagggtccaccatacccgtcagctagacccaaatattctgaagcttggcggccgagttctcccgcgcaccgttgccgtcagccaggaaagcaatgttatgccagattaatccggaaagcaggtgatcaaaatgccggccattgtaggcccgttacaaatctataatgttggaagcggcattgtccattttggagacacagctgttatctcaccgaaaacaagttcaaaaacatctaccggctccggttctctttccacttccgcatttgtcattacaaacaacgcgctcagtgcaaacaatacggctaacggcagtgttgtcgaccagccatctgcaggaaataattaggaaagcagagagagcaggcaaattctccgctgcctcgctgctttcaaaatggaaagacaaattttttatagggtgctgtacgttatagcaagaatgggccattttaaaggaggcccattcttgattgaatttgaagaagatgcccgccatcaaagaaatacaagtattgttcttttacctttttctttaaaatggtttccagcgcccttgagtaaagggcaagctggacttcataacgtttgcgcaggacaggctctgcttcttcaaatccgcctttaaacctgccgtggatattgtctgtcttaaaatcgagcaatacgaggccgtctttttcctctgccacgcaatcaaatatgccctggataaggacatgttcttccgcaagggatggatcccggtaaatttccgccgcgggaacggataaactgaacggcatttcccgcatcacccggccggctgcaaggacacggcggccaatatccgtttcaaaaaagcggacaagctgttcagccgcaatggcatccgcctgttcttccgtgagcagctcctgtttcaccatctcttcaaccagtgcttcaacggaagcataagtcggcggcgcatcaaacgggatatgctgcatcaccatatgcatcgctgtcccgcgttcggccggcgtagtcgatttttcctgcataaaacgggggcggtcaaagatatgtttttccgcattcggaataaaccgggtgtcattcgtttcatcatgctcttcatgcatccgtttcaattccgataccgattgtttggcacgccggaatgttgccggctcattacggtaccggaaacttaagcgcccgaaaacttgcgctttatatgcggactccgccgcaaccgggaggccggctttcacttgatgctgccagtctgcttccccttcttgttccggttccggcatatcggcaaactgttctttcggcaaaacggcgatctgccatttggacggatcatccagcaccacccggccggcatccccgaaaagcgctgttccgtccgcatgcctgctgagcgaaggcatgatccagtccaaataagtgccggccgctgcgcgcagatggtctggcatcagccagccttcctgccgcctcgttttcccccatttttccaggcgtctgcccagatttttcaccgtcccgaccaaatacagtttttcttttgcccttgtgagcgcgacatacaagacgcgcatttcttcagccagcatttccagctttttctttcttttaaaggcaagctgtggcaaggacggatatgtgatccgtttttccggatgaatgtactttgaggcgaacccgaaatctttatctagaagaaatgcctggctgatatcgcgcatattaaatttcctgttgaggcctgccacgaacacgaccgggaactcgagccctttgcttgcatggatggtcatcaggcggacaacatcttcctgttcgctcaatgccctcgctgttccgaggtcatccccgcgctcctgcatgcgttcgataaaacgcaaaaaccggaacagccccctgaaagacgtttcttcatattgccgggcccggtcatacaaagcccgcaaattggcctgccgctgctttcctcccggcagcccgccggcaaaatcataaaactgcgtatcccggtacagctgccaaatgagtgaggacaaatccccctgccttgcaatagaccgccataccgccaatttctccatgaatctggatactttctcatgcgcttcttcttccccgggattcggcctgtctgctataaattttttaaacgcttcataatacgggccccgtttttcatggatgcggataagggcaagcgcctcttcatcgagcccgacaatcggggaacggagcacgactgcaagcggaatgtcctgatacgggttgtcaattacttttaataaagaaagcatgatggatacttccgtcgcgtcaaaataaccggttgaaagttccgtgtacaacgggatgcccgcctgtttcaactcttccattatggtcggcgcccatgccatggaacgcatcaggataacgatatctttgtaccggatcgggcgggatgtgccggttttcggattgtaaacctgttcttcgccgatcagtttttttatttcacgggcaagataacgggcttcaagctgggattgttccaattcggcccggtccagcgtttcttcatccggtgcgtcttcctcctcgatggcttcatcggcctggtcaatcaatgccactttgaccggatgatccccttccggataagatgcgcctgccacaagtgcagcctggctgtcatagacaatctcgcccacctttaggcccatgatttgtttaaaaataaaattcgtgccgtcgagaatttctttgcggctgcggaagtttttcgacaagtcgattctgaggcctgcatcccggccttccggatcaaaatcccggtacttttttaaaaacaggttcggctcagcaagccggaaccggtagatgctttgttttacgtctccgaccataaaccggttgccgtcaaatcccgccccttttgccacaagattcatgatcgtttcctgcaccatattacaatcctgatattcgtcaatcagcacttctttaaattgctgccggtaagctttggccgcttctgatgggatgagggcgccgtcttcattttttttagcaagaatgtccaggcaaaaatgctccaagtccgaaaaatcgacgatccctttttctgcttttaccgcgccgtatgcgtccgcaaattttttcacgagcgttctaagttccgcaatcaccggccgcatttcctgcatgtctttcaggaaagacgccggcttccttgagaaaaagtctttttttaaaccttcaagtgttttctttgcagatttccgcaaatcatcggccgctttaacgagctcctcttcatatgcctcccctttgcacgctttggcgcgtgtaaagtgccatgcattcatttcttcataaagcccctgccagggaccgtgaatggccgcaagcaatctgtctgcaatttttatgtcatcgagataattttccgcccttggcgcaggcccgcccggctctaaagcaagcccatacgcttcctccagcatgtcttttgcagcctgcagctggaggtggatatcttctttcaccgctgccataaacggaaggctgtccacctcttccacatccccggcatcatacatttcgaccattttatcaagccatgcagacggatccggatgggaacgggaaaagtcgtaaagcttccggatcagatgctggagctcgtcatcactgcggtcgtttgaaaatgtatccactgtgcggtaaaacaggtcatttccctctttcgcatactccgcttcaaagaggtcatccagcacttcatcgcgcagaagttcggcttctgtatcatcggcgatcctgaatccggggtcgatgtcaatcaaataataatattttcggatcacttcaaggcagaaggcgtgcagcgtggaaatcggcgctttattcagcaggctcagctgtttccgcaaatgatgcgaatccgggcggctgctgatcgcctcctcgatcgctttaccgatgcggtggcgcatttccgcagccgcggcattggtaaaagtgacaatgagcagttcatcaatgtcgagcggatcgtgatcatccaatattttttggataattctttccacgagcacggctgtttttcctgaaccggcagccgccgcgacgaggatgtcctgcccttttgccatgacggctttccattggtcatccgtccagacggcattcgccggtttatccggaatggctgttttcatctgttctgcgctcctttctcattttggcgaggatttcttccggtttttccgggtgaatgaggcggtaattgttctcttccatcgactggtcaaactggcagactgaacggaacgggcagaatgtgcacgccgcctgtttttttattttataaggcgcgatatccgtcgtgccggacaggatcgcattgccggcctctgtgtaaatgttgcgcacatagctgcggatcgcttcaaagtcttctttgcttgccacttcggaccgggccgttaattggccgtcctttttcaaacctgccgacacaatcgcactgttgccggattcaagcgactggtccatcaatgtgatcacttccgggctgtccagcaacagcccccgcatccggaagtcttttaaaatttcttcttcaatttcttcagccgtcagcattttttccgccgaaatcagcggatcatgaagatggaaatacaaaacgcccgccggaatcgtttcttcacctgtcagctgtttcgaatacgtcataatgagatccagataagtgagcatttgcaggtcaaggccgtaatacacatttgtcaaatcaagcttgtgcgcgcttgatttgtaatcgatgatcctgacgtacacaccgttttcgctttctgccttgtcgacacggtcaatccggccctgcagctccattttcgccccgtttttcaatgtaaatgaaagcggcggaagctcttttttcggcccgaaagcgagttccatcgcgaccggttcaaagccgcttcgtttcgcatggacgcttaaaatataagaagcccttccgacaacctgttccagtttccttttaatatattggtagcgtttcgaactgagcaggatttgatgctgcaattttggggcaaggtcgtccactgccgcttttgcaagctccatgctttgctgctttgtcatctctgaccacggaatgccttcgcgctgcagggtatcggaaatccatttcaatgcgccgtggaaaagatccccgatattcggcgcatcaaggcggaacacatcccgttcccgcagcctcaacccgtatgtcgaaaaatgggaaaacgggcaggtgaaaaactgctccattctcgatacgctggcaaggatatggtcgccgtacagttcccggctcgttttttcggagagcttccgggctttgttttggtaaaacaaactggaaaaagcatgggccgcccggtttttccattccgggttctccatatagaagttatacgtatcccaccagaagccggccatgggataccctctttttttcagctgcagctgcgaagtgacaaaagcaatagcagccgccggatgggaaatgtatgcggcttgctgtttctcttccagttccgccgggtcatttacccataatccgccgccgcgggccgggaacatgtcctctatccggttgatgaacggggacggcagcaatgctttcccttcctcatcggcaagcggaaaagagagaaccagtttttcagacggcgtcgtcaatgcccggtaaaaaataaattcttcgtccagcaggcgccttttgctgccgggcatgatttcaagcccttccagccgcaaatattcacgctcttcatcatttaaaacgccatcttcggaaattttcgccggcatgaccccgtcattggccccgataataaatgccagtttgacatcggacagccgggactgttccagattcgccacgagcacctggtccaaagccggtggaacaatggaaaattttaatgactcaagcccggtttccataatggcagagaatttcccaacatcagcaggtccatcgccaaggatttcaacatactggtccaaaacgcccatgacttcatcccatgcctggtcatgttccctggcagcaacaagatcccccgcttcttccttttcaagccggagcgcttccagtttttccggaatctccaattcttcgagataaagatacaatgcttcgcaaagcgcttttccggtgcgggcgcgcttcaaacgccgcgacaggcgcaaaatcggcgctgtgaccagaagcctgagttcattcagttcctgttcgatttttctttcctcatccgtttgcggaaggttttccagttcgaggccgcggatccgcctatattcccatctttttctgctcgtccagcgttctccctggatgccgtaagccaggcaatagttttcaagccggtccattttttcacgcaacgtgcgggcatctccaggcggaaacagcaattctgttttgatggcacggaaaaccggttcataacgccagttgccgcggatgatttccaaagtcgaacggatcagttcaatgagcggatggttcagcatcggccgttttctgtcgataaaatacggcacatcataatcgtaaaaaaccgtttcgattaaatcctgataggcctccccgttgcggacaaggatggcaatatcacggtaacggcagcttccttccatgacggcttcacggatagaacgggcaacgccttcgatttccgcccgccggttgttcgcctgccagatctcgatgctgctttcccccggaaaagaaggaaacggcagttcttcaaaccgggactgcaaaaagcgcaaactttcatgcctgaaacgggccggttcatacagcgccacgtcttcttccgtttcaatttgaaaggcgcgcgccagttcatagatatgtgcataggcttctcccggcatccggaacaagtataaatcatccggctgcctcccgcggaaagcccggtccgttgtgagcgcaaccgtaacgcggcggcattttttcaagagttccccgatcaccaggtattcctgcgggttaaaagtatggaacccgtctatataaatttccgcatcttggagatagcgcgatttttcaacggcagaagcaagtagcctcaagtaatcttctgaatcaatgtatttgccttccagcttttgctcatatgcctgatatacgcgttccaaatcgtgcagcttgtcggaaagcactcttcccccgtccgcttccccgattgaggcgcgtttttcctgaagctgtgcaggcgagacgcaaaaccgtttgaactcagtcagaatgcgttcgacattgtcaataaagcccgtcttatccgccgcccgcgtgaaaaccgacagttcttctttttggtcttccaaaattttccgaatgagcatatttaatccgatgctcgatacatgggtacggctgatcccgccgacttcctgcaatattttccaggcaaggcgcgtaaaactgtacacctgggcacggatcatcccgcccagttcaggttcatgcgcaagccgtgtttccgataaaaaagtcatttgctccggaacaaggtaaatgagcggtgccccgcccggatcgccaagcagtttctgcctgatttcacgttggatgaaagttgtctttcctgtcccggggcgcccggtaataaatcgaagggacaattggttcacttccttttgatgagctcattggcccccatatccggaaagatgccggacaaggaacatttgttcttttattgtaacggatattgtgctatgaatcaagcatttttgcctaaaaaatatgcttcctgtttttttctgccgggggatgcccgcttccacgtaaaacactgcctgttcccgccccggaaaaatccttcctatccaatccggatgcccttcccgtccggacggggccgcgaaccgccatcagggcgcgctcctgcttccagacgtataatgccgaaaaaaaaagcactgcctgttccgggaaacgtcccgcaaaatgcagtgctttcacacctcttaatccccgtcaaacaaatcaaacaagccttttgccatgctgccttcatcctttgaaccgcccgctgccggcattgcggcaaatacgcggctggccaggcggctgaatggcagcgactgcacccagaccgaccccggcccgcgcaaagtggcaaagaacaggccctctcccccaaaaagggctgttttgatccctttgacaaattcaatgtcataatctaccgtctttgacatggcgacaagacagcctgtatccaccctcaatgtttcgccgggtgcgagctcgcgtttctggatcgtgccgccagcgtggataaaggcaaagccgtctccttcaagcttctgcatgataaacccttccccgccgaaaaatccggttccgagtttccgctgaaattcaatgccgactgagaccccttttgccgctgccaaaaatgcatctttctggcaaatgattttcccgcccagttcgcttaaatccatcggcacaatcttgcccggatacggcgctgcaaacgctgcatgctttttatcacgggcttcgtttgtaaaggcggtcataaacaggctctcaccggtgatcagccgttttcctgcagagaacagttttcccataatgccgccgccctggccgcccgagccgtcgccaaaaatcgtttccatccggatgccgtcttccatcatcatcaagctgccggcctcggcaatgacggtctcctgcgggtcgagttctacttcaacaaactgcatgtcgtccccgaccagtttaaaatcaatatcgtggttgttcatttccctacctcctcaaaatgcactcccccctgtatacggacttgcagttcgcaatgtttcatttttatttcccgtgcagcgttcgttttattggacgaaaaggcagggaccccccttccctgccaggcttaaatccaatacagcccgctctcttccatcgccctgtatccctgttgtttcaagaattgcatccgggagcgtcggatgttgatttcataagcaacctgcaaagcagccgctttatggtactgattgataaacgatccatagctgattggcaacacgagtgattgattgtttgaaaaaaccacttcagtttttttgccttctggggtgtggtctttaatatgtccggagatcagccaaatacaatccggctggctgggcgattttgttggaaaaagtatggtagctgtatggggatcgacgaggatcggcggcttgtgccggacatgaatcaggctttttgtcgcattttttcttccttcgtaatcgcttccaaagtatttgcagctttttttcacgatattcaggggaagttccggcacaaatcgttcccgatccacttccaatattttggtccctttttctcccccctcctgacaaggaatcagcgcaatcgtgtttggatgaatgtccaattgcccatgttgcataatgcattcccccattttatttttctcatgatccactctctattatagtacaatcttcctacatttctagtacttttttaaaaatatgcatttttttctttgttaatcgtttcagaaaaattcaatttttacattgctttttattgaaatgctctgtataataaaaaaaagcgaaaaaggtgatcatacatggaaaacaaaaaatctttctctgacgtgccgaaagaaagcccgaagtcccggattcagatggagaaatttgtggaacacatttacacggacatgttgctgaatgagatcctgctgaacaaaaaaagagaagagttattaagaaaaattgaccatgtacttgatctccgcgatgaggagcagttcatgcatttaacgaacgaacttaaaaaaatcaacctgcaatttggataaatacaggccatgcaaacaggcccggcccgtttgcatggcttttcttttgcataaaaatggcaggtgcagggcacggccaaaagatttttgcccggaacaggccgcgcctgctgcactttcagtattccttattcttccagcatgcggatccgctccagtattgtcggatggtcatagcgaaatattttgacgagaagcggcggattgacttcgcttaaacccgcttttgttaaaatttggaacgtttcaaccccggactttttatcatgcgtcatctctacggcgtaacggtccgcccgcatttcctggtagcgcgatgcccaattggtaagcgggctcgacgcaaagagcagaactgaggaaataagcagaaataaaggcagcgagctgatgctggaaaccccggacatccaccgcccgcttcctttccaacgcccaaccgcatccatccatctggcaatcagccacagcccgatgagcatcatcaacatataacccgcgatgccgaaatatatatgtttttccacataatgccccatctcgtgtgccatcacgaataaaatttctttatcatccatacggttgagggtcgtgtcccagagcacgattcttgagttggagccgatgccggtgacgtaagcattcagggcgtttgttttttccgacatattcacttcgtacacatggtcagcaggaatttgcgctttttccgctagcgccagaattttcgcctccagtgccttgtcttttaacggataaaaatcgttatacagcggatcaatcacgaccggctggataaacatcataaacaccgtaaaaggaatggaaagcagccaggccgggagccaccatttccgccgaaattttttcatcagggcgtacaatactgcgacgacagcaaacatgatggcaaaattcacccagaaatcggtcagttcatctttcatccatcctgcaaaattttgggcggaaatgccgtacgcttttgaaaaacgatgggacaaataatcgaacggaaaggtaaacaaaaaggctgcaagcgaaaaccaaaagaaataaaccgcggtttgaatgaggcggatgtgtgaaactgccgctgcccatttttcaaacattttggaaataccaagcacaagcaccaaaaaataaaacaaccactcatatggcacggacaggaaaaaaagcagattcctgatttttgagtattcttcgcttagaaacaattggcggccgctcataaaagtagctggatcggcggctgtccctttatattgggcgggaatggcggcatcggcgtaatgaaacaaataccagtacatcaaaaggccgaacaaaacgtatgccgcaattgcccgcagcgcccactttatcttcactccacatgcactccttccttgtcctcttctatatatgtagccaaggaaaaaggcatttagaacagccaatacggctttgctccttcaaaacagaaaagaataaaagctcaacaccgcaatcgccccgagcacgacaatgatgacattcgcgccaataaatgcgaggatgatggccgttcccgcgccgatcactccgaacagcggatctttttgaatcaaaaacacttttggaaaaatcaaggcgcctaaaatcgcatacggaacattttttaaaatgccttccaaaaagggcggcagcgttttgttttgcaagaggacgaggggcagtatccgcggcaaaaacgtcacgatgcccatgccgataatgacgaggataatggtgctcatttttcttccacccgctttttccatttgtatgtttccgctatttcaaccaaaacagccgacaacaaagtggagacgatgatggaccagccttcctccatgacgccgtaaccggtaaaaatgctgtttgacactgctgaaagaacggcaaggaaaaggactttcacactttttttcaaagacgggacaaggaggccaataaacatcgcatacagggcaaccgtcatgcttgcctgcaaaaattgcggcaggttggctccgatcacatacccgatcccggagctcactacccaactggcataagcgataaaagtgacgccaaatccgtaaccgatcggtatttttccgttccgtgtggcgagcaccgagaaagtttcatccgtaatgccgaacgcaaacaatccgcgtttccatttgctttgttcttccactttttggctcaaagcggcagtcatgagaaaatggcggatgttgacgacaaaggtggtcaggataatgacaaacgggcttgtgccggcagcaatcaaacttaaacccatatactggctggcgccggcataaacaatcaggctcatcagcacagtctctatcagcgtcaggccggttgttttagacaacaggccgaatgtgagggcaatgggaaagtatccgatcgcaatgcttgcgcctgcctgcagcccgggtttaaaactgcctgttttttcctctgccatggatgctgcgtccaacttttatccccccagctttaaaatgattatcaatattcttatattttcctattatacgccttgtctgtttttctaacaagatgccaaaaacccgccattcgttccggagggcactcaaaaagttgtgtttagatacaggataaaaaaacggcgggacactatggatggtggtgtcccgccgtttctttcgggctttcgaacggcttcccgctccgagagcggattttatctgattggctttcaagcgttctttgccggttactgccggttttttaaagggtttttgcaatccctgattccatattgcgattttcccgggaagcaagtgttaagccgcggttttccaatcacgagtttctgtatctccgttttttatggccgggccgattgtttttgcagctgttcttttaaagacctgcgcaaaattttcccggttgtgtttttcggaagctcttccagaaattcaatttctttcgggactttgtatttggcaagccgttctttgcagtaatcgagcaattcctgttccgtcagatttttgtttttcgatacgacgtatactttcacggcttccccctgatctgggtcagggatgcctactgcagctacctccacgacatccggatggtcgtaaagcacttcttccacttcgcgcggatacacattaaaaccgccgacaataaccatatctttcttgcggtccacgatataaaagtaaccctcttcatccatcttcgccatgtcgccggtatgcagccagccgttccggatcgcagccgccgtttcttccggcattttatagtaccctttcatcacgttcggaccgcgtactacgagttcgccgacttcgccgacaggcacctcatttccaagctcatccacgactttattttcaacatggacaatattggtgccgatcgatcccggtttgcgcggacggtcaagcggattgaagcaggtaaccggggaggcttccgacaatccgtatccttccgaaatgagcacattgaattttttttcaaagtttttcagaagcgcaaccggcatagaagcgccgccggatatacacagcctgagcgtggcgaagtctttcggatccccgccttcatattggaacaaataattgtacattgtcggcacgccggcaaatatcgttgctttgtaccggcttgccacccggaacacttctttcgggctgaacttcggcaatatgagcagcgttgccccgctgatgagcggcgcattcacggcaaccgtcaggcagaaaacgtgaaacatcggcaacgccgtaatgacccggtcatccgcgctcattttcaaataggagccgatatcgctcgcattcgaatataaatttttatgtgtgagcatcgcccccttcggctttccggtcgttccggacgtatacaaaataaccgccgtatcctcttcagaaagcggcacttcatcgacggacggcgaactttccgccagtatttgtgaaaacgatttcaattttgggtgcgtatgtttgcccgcttttgccggatcggtttcacaaatgatgtaatgctccactttcggcagccgggcatcgatcttatccacatacgatgcaaataaatcgagcgccacaactgctttcacatcgccgttatccaatatgtagcggatttcctccggcgtgtaaatcgggttgaccggtatcgtggtcacgccggcccgcatcgccccgtacaaggcaataataaattgcggtgaattgccaagcaaaagagccatatgatccccttttttgagtccgagttttttcagcccgtccgcaaactttgaaacggccgtgtcaagctccttgtacgtaacaggctggtccataaaaatataagctgttttgtccgcgtttgtttccgccgtcttttttaaactggacggtaaattcaatttctccctcccctttccgaatgaacaatcattcattctacccgtttattatataaaaacaattaaaatatttcaatacaaattcccggattgccgattggaacccgggaatttgtgtgttcttaatagatgaggctgataaagtcttctttcgttatgttgccaaaataatgccggatatctgtgccttccaacgctttttcaatgccggcgcgctcataacggcagccggccagcttttcttctatatcctttacttccccgatcccgaaaaaatcgccgtaaattttgcagttttcgatgatccctttgttcacttcaaggcgcacatcgaccgttcccgccggaaaacgccgggaatggcggagattgaattttggcgattttccatagttccattcccatgtctggtaccgctcttttgaaatttggcggattttttcccaatccttttcggtcagcttatattctggtatgtccttgccgccgaaaatgttttccaaaagcaattgcctgaatgccggcatggggatcgggcggtcgagaaattcggagatgttggcgacgcggctcctcactgacttgatccctttagattcgattttttcttttttgacctttaaagcctgtgcgactttatcaagttctgaattgagcatcagggtgccgtggctgaacatgcgcccgtttgtggaaaactgcgcgttccccgaaattttccggttgccgacctgaatgtcattgcgcccgctcaattctgcgtttacaccgagtttgcgcaatgcctgcacaaccgggtcggtaaatttgcggaaattgctgaaggactcgccgtcatcttttgtgatgaaactgaaattgatgttgccgagatcatggtacaccgcgccaccgccggaaagcctgcggacgacgatgacaccgtttttgtccacgtaatccgtgttgatttcttcgatggtgttttggttgcggccgataataatcgacggctggtttatgtaaaaaagcaaataagtttcattgatatcgagatttttcaaggcatactcttcgatagcaaggttgatgcgcgggtcggtaatgccctggttatcaataaacagcatagtgccgcctcctttatgcaaaatgtaaagcaatccctttcattttcattatagaacaagggatgcccgtgggcaatctttgatcttttctctatttttctaaaaaattcaccatttcgccattgacattcaaaaactgttataatacaattaaaaacataataaacagttatataacaaaggagtcgtgaaaatggtacaaaatattttagactttttcaaaaacctgcctgataaatattgcacagaatgcggcgaaaaaatcgatgagcagtcggaatgctacggcaatacatgcccgaactgcctgcacgtgaaaagccatgaatagcaaaaagggcagcgcaaggcatgaaaaaacgccttcacgctgcccggtttttttttaacggctttccgaacgataagtcgagaagcccccacttcaattagaccgcaaggtcaataagtggtgggtagttcactttacggataaatcggttttaggcatgacatgcattttccgcgctgtcacatgcacctggaccgtatatgtgccgggttctttaatgaccgtttttgcggtataaatgccgtgctggtcatgcttcgcttccagcatcgagctgtttttatccgaatttttcttccagatttcaaacttcacttcgtctgcatcgtctactttttctttcccttgtgtgaccaccgcctttaacgggatgcttgtgccggcgtcagccgttttgggaacgatgagctgtacttttaccaatttcgccggttttacagccgccgtctcctgttttccgcatccggcaaagagcgaggcggccatcaggaacaagcccgccaggatccactttctcaccatttccaccctcttttttctgttttgaccgtttatactgaaaatacatgttataatgatcatacaaaataccgcttacatccgtaaagggggggctgatttgaagagaaagatggcacttttcgtgttgttcgcatttttgcttccggcgctttcctcctgtgcgccaaagggggatccggttgaacactttcaatttacggatcagaacgggaaattttttagcctgagcgatttaaaggggaaagtgtgggtggccgactttatttttacgagctgtaaaacagtgtgccccccgatgacgatgcatttgagcgaattgcaggagaaaatcaaaaaagcaggttacaaagatgtggagcttgtatctttcagcatcgaccccgaagtggatacgccacaaaagctgaaacaatttgccaaccaatttaacagcgatttttccatgtggcatttccttaccggctattcgcagaaaaaaatcgaaaagtttgcgatgaaaaattttaaaaacccggtcgctaaatcggacggaaatgaccaggttgtgcacggcaccagtttttatgtcgtcaataaaaacggcgagcttataaaagactttgacgggagcgcggactttgatgctgacaaaatcatgaaagaaatcgaaagactgcgataaaaaaaacgccggctggtggccggcgcttttgattatttatactgtacatatacaacatgcgtttgcaagtattcctcaagcccgtgtttgccgtctgcgccgccgacgcccgattttctccacccggcgtggaatccctggattgcttcaaagctttcacggtttacatacgtttcgccaaatttcaattcattgctggcgcgcatcatcgtatccacattggaagtgaaaatggcggaagtcaggccgtattggtagtcttcgccagttcaatcgcctcatcaagcgttttaaacgtggcaatcgggaggaccggcccgaaaatttcctcgcgcatgatttccattgtgttatcaacattgacaagcacggtcggctcataatagtagcctttgtccctttcggcctggttttgaaggctcaagccttaggctttcccgcttctccgcaaacaaatccataaggaaaacagcgaaaatcaaaagaaaaataagaagagaggggaaggaaacgaattctttaagcggcagccaccaatttgttctattgttcacatagttgtccttttccttatgaacggaagagcattataataggagatggaataaaattggaataggggaaatttgccctgctttttttggttgatcatcagatgaccggataaccatttaaacattttaatgagatcgaggtaatgaacatgaaaaaaggatttttgtatattgttttgtctgctgtatttttcagcacgatggaaattgccataaaaatggttgccggtacgtttcatccgattcaattaaacctgcttcgcttttttattggcgcggttattttgtcgccattggcgtttcagcatatgaaaaaatatcattttcacatgacaaaggaccattttttgttttttgttgtaaccggctttttatgtgttgtgatcagcatgacattttaccaattggccattgtttatacgaaagcttccaccgttgcgattttgttcagctgcaacccgctgtttgttattccgctcgcccattttcttttaaaagagcgtctttcgaagcggacgctggttgcattgggcatcagcctagccggaattttgtttatcgtcaacccgtttgaaatccaaagccctttcggcatcattgttgcgcttctttcggcggttacgtttgcgctttacagtgttgtcggcagaaaaggcagccagcaatttaaatgcgacggcgtcattttaacctgcctgagcttttttaccggcagtatggaaatccttgcgcttgtattgatttcgaaaattggatttgttgcgggctggctgcgttccataggcctcagcgtatttgcaaatgtgcccgtgttccgcggaattgcatggcatacgctgccaagcctgatttatatcggcatttttgtcactgggctcgggtttgcgttttacttccttgcgatggatgtaacgagtgcatcaatggcttcgatggttttctttattaagcctgcactggcgccgattttggccctcatttttctcagagaagcgattacgccggctgttacggtcgggattatcctgatcgtcgcaggttcgctgatgacgttgctgccggccggaagcaaacagcccgaactcagggtcagccgggcaaaaaacagataatcttttcatttaaaaaggcacaagtgtgatccgcacttgtgccttttttgttttactggttcagctgttccgccggggttgccggtgaaacggctggtttttccccgccccggacggtcccgaaccgttctttttcaatttcttccagcgtttttccttgtgtagacggcgcgagaacgattccgatgatacagtggatgacaaggaatacgatcatcacaattcccgctactttaaaactaagcgtgtccataatggttggaagcagaaaaaaccagatggcaatcccgaaccggacgaggaaataaatgaacccctgtgcgcccgcgcggtaccgcgtcgggaacaattcactcgcccacaagccgtaaaatgcctgggcgccaaatccggcagcgcttccccagagaatgacaaaagggagaaccaattcatccctgtaaaagtcaaaataagccatgcggcaagccgcttgagatgcaaagaccggcatgcagctctgtttacaaatacagccataaaaaaacagcaggaccggccaaaatggcttcgtcctgccgctttcacagcaaatctcttatgcttccatcggagaggctgccccctccttttctaccatcttatgaaggtgtctaaatttcacaacaaagtagagaagggaaagaaagataaacaccgcaaaaaagaccgaaagcttatcggcattttgccacatgaaactgaaatcgccgcttgaaatcaccgctttaaacatttgcagcgaatatgtcatcggcatcaggtcatggacagcctgaagcggctttggaatcaattcaagcgggaaggtgcctgcgcttgtcgtcagttgcaaaatcaaaatgatgatcgcaatgtacctgcccgggttcgcgaatgccgcaaccaaaaattggatgatcgccatataagtcaggctcgtcataatggttgcaaagataaacagtggcacactttgcacatgcaatttcagcagatcaagcagaatgaaatctgccaaaagcgattgtaagatgccgatcagtgccatgacgccgaattttccaagaaaccaggttaccccgtttttcggcatgattgccggggcttttacattgtagataattgtcagcaataacccgccgacaaaaagcccgagcgataagaaatacggagcaaggccggtaccatagttcggcacttttgtcacagcatcatggttcagccggaccgggctgctcatcatattataagtggcgtcggtcggattgatggccccggcctggtcagccgctttgccaagtttattgctcagtttatctgcgccggcatttaattggcccgtgccggaaacaaggctgcccgcaccgttgttcaactgcttacttccgctttgcaactgagctgcgccatttaataattgggacgtgccttttacgagcacgcttgagccgttcgcaagtgattgtgtaccgttcgtcaatttatttgaaccttctgccagttttccggtcccttctgcaagcgcgcttgaaccttttgccagttgtttcgttccgtttacgagctgacctgaaccgccggaaagctgcccgagcccggatgcaaccgccgttgccccggattcgaggctgtttgcgccggatgcagcttgttgcagtttttcattaaaaatggttgcgtttttgacgaatgcattttggccgcttgcaagttgctgtgcgccgtcattcaaacgattggcgcctttggcgagttcgccaataccggtttgcaattgttgctgcccgctgcttacctttgtaagcccttcgttcaggtcggaaaagtacggagcaatcgcctgttgaatttggctttgcaaagcggcttgcgtagatgcagacccgctggttaacgaggccaaaagctgctttttgacctgctctcggaatgcttgttggaattcctgtttcttttcctttgtataattactcaagtaattactcaagacttggttgtaaaccgtcttatatgtttcggccggcagcacttgttctaactggctgcgcaggtgttctgcctggtccttttgctgttcaaacatgctaccgctcatctcatcgattttctcatcgatttgcggctgaaggctggtaagcctggtctccatgttttccttcatgttttcatccatcttgcttgtaatgcccgctgcaagcttttcaggcaacttttgttgcagctctttcacgccgttttgcacttggacggtgccgctcgttaacgccggaagctttttgtttgcatcatttaagccattacttaatttggcgctcccgtctgccaccttgccggctcccgtttgaagctgtttcgacgcatcaagcaactggccgcttgccgaggcaagctggttcatacccgaggccagcgtttttgaaccatttgctaccttatccgcacccgattttgcctccgacagcccgtttgaaaaagtaaccgagcttgccgccaattgggccaaatggtttttcaaggaaacggcgccgctgtcagcctgggcgatcccttcgccgagcgtgcgtgaaccgttatacagtttcaaagcgcccttgtttaaatcagccgccccgttatggacccggccgatgccgtcgttcagggcggtagcgccggtcaacaaattttccgttccttttcttaagacaacagcgccgtcttttagtttgccgcttcctttggcaaggctttttgccccgtttccggcagaccggtagccgtttgccatttctttcactttcccgaatacttcttctgtatacgtttttgtcacctgttccgcaacgctcgattttatttttgtcattgcagattcttcaattttggaagaaatgtagttcattgcctggttttgaatatagttcagctgcaatttttgtgggtttttatccagtaaagtggttgcgtttttagagaaatcttcagggatctctataatcatataatattggttatctttcagttttttctccgccgtttgctgatcgacaaagtgaaaattaaagatgtccttttcttttaaatttttgacgagcttatccccgagggcgagatgttccccctccatttgtgcccctttgtcttcatttacaacggcaaccggcaatttttcgagatgcccgtacggatcccaaagagaccagataaacatgccggcatataaaattggcacaagaataatggctgccgtttcaatcagctttttcggcgaacgtaaaatactccgtatttccgcgaaccataaattgtccatctaaaatacctccttttccagccgaaaaatcagttctgcagcccttttaacaaatacagttcaaacgcctccgcaatttcttccttcgacagagaatcatggtgtttttcccagtcaaaaataatggcgacatacagtttaaacatgataaaagcggtcaactccggatcgcacggtttgattttccccgcctgtatcgcccgttccagcattcctttcaggtagtcaatgatcttctcttcaattttctcgaccatgtcattgacggccggcgttcccatttctttctgctcttcgaataatttaagcgtcagctgatgggttttgcggaattcaagaatgctgaacagggcggaatgcagattggcataaaaagaagcttccggatccattgacgcttccgccacctgctccatttcatcaatcaggcgggcaatgatttcatggaataattcttctttattgcgaaaaaaattgtaaatggtcccctttccgacgttgcccattttggcgatcaaatccattgttgtcgctttataaccatactgggcaaaagattttgtagcagcgtttaatatttgcagcctgcggtccgtttccaagctttccacctcccgttagaacgagtgactgatttggttttttggtcattttcgcacaaaagtaatataccacgtttcctcctgaacatcaagtatttgtatccgggaaccatgatgcttccggccaagtctctgcagtgcttttcattggcgcatttttcattcgtttcttcaagtaaaagcattccttcgttgggaatgatctcccgccgctgcgccatacttgcatggcaacgcgccggaaaagattttacacatgtatgcttcccgttttcgtgacaataaaaacggcaggtgccagccgaatgcaccatgccgctttcttcatcacctattaaaattcagcccgaagccggaagtaccggagcatctcgctaaccgccgcccttccctgggagatgcagtccggcacgccgaccccgttaaacgagctgccggcaaaagaaatgcccggcaattcgtttttggctgccgctaaaattttcccgattcttgctttatggcccaccgtatattgcggcatcgcatatttccagcgggaaacaacagtaaactccggttctgctgttatttccatgattttatttaaatcttccagcacgattttctgaatcctgtcatccgcgagatcgacgactgcggattccgctgaccggccgatatagcagcggagcaacgcctttccttccggtgctgtatgcggccattttttatgcgtccaggtgcaggcggtaattgtataatcactgtttctcgtcaccacaaagcctgtcccgtcaatgtcttttttcaccgcgctctccggaaacgccatcgagactgttgcaacagatgtggatggcaccttttcaagcggcgcaaaaaaagcatactttgaaaaaatatgggggagcgaaaaatgaggaagggccgagataatataatccgctgtgatgcgggttccatttgtcagtgtgatcctgtaatccccgccgcccgtactcatttcaaccgtatccactgtcacgcccttcatgaccgcctcagcgccgattttttcctcaagtgcttcaacgagcgtttcgaggccgttttgaaaggttaaaaaagcccccttattccgggttggcctggagtcttgcgcaaattccgccgctacttttttcatgccgaggatcaggcttcggtgtttttggacagcctcgaaaaattgaggctgcgttgccagcacgctcagctcgtcgacatctccggcatacaccccgaacaataatggttcgacaaggttttccagcacttcttcaccgagccggtagcggacaaaatccccgactgaccggtcttcgccggtatttttccgggaaaggatcaaatcgcagagcgcccggattttgccggtaacagaaaacaaaggagaagcaaaaaaaggcgccaatcttgtcggaatgcccatcacagaacctcttggcaccggatagagctgttggtttaataaaatataagatttgcctgtcgcattggatacgagggaaggcgacagcccgagatcttctgccagatgcaaagcgctttgctttcttgccagaaaagaatccggcccgcgttcaatgacaaatccgtcccgcctgaccgtctggatttttccgccaagccggcgccctttttccaacaatatcacatcaaacggcagctgttggtcctcaacaaggcgccgcaaataataagcagctgtcaagccggtgattccgccgccaagcacagctactttttttctgtttccggccattgtcagcaccttctttggcaataatgtcatgttttatggaaatccgtgaaaaaatctcaggcggctgcctattcttgcggcagcaaccctgattttgtttttttcaaaacagcctcagccagcgaatcaataaaagccgggttgtcattcggcatttccgggcggtaatacgatgcgccaactgaatcgcaaactgccttgcactcataatcattatcatataaaacttccagatgttccgcaacgaacccgaccggcgcataaatgaaggctttataatgatgtttttcatacagcgttcttgtaaggtcttgcacatcggggccgagccacggatccggcgtattgcctgcactttgccagccgactgcatacgtctgcacgcccgctgcctccgcaatcagatcagcggtttcccggatttgttccggatacggatcgccgtactgcagaattttttccggaaggctgtgggcggatacaatcaagcaggaagacgtgcgttcttcttcactcattgtagcatacgttttcttcaattgatgtgcccaaaaatcgacaaatttcggttcatcataccagctttcgaccgattggatggcgggcccgcccagttttgccgctgtttctttcgccctttcattgtacgatttcacgctgaaagccgagtaatgcggcgcaagcacgatcgataccgcttcttcaataccgtcatcatgcatttgtttgactgcatcttcaataaaaggttcaatatgttttaagccgatataagctttaaattctgccccgtcttgccgttcattcaacctcgattcaagcgcatatgcctggttttccgttattttggcaagcggggacaagcctccgattgctttataccggcgtttcaaatcttccagcaactcatcctggggccttctcccgtgccggatatgggtatagtaacgctcaatatcttcttctttatacggcgtgccgtacgccatcacgagcagtccgatttttttcttttccattatgcttcctcctgttgttttctttcgctgtattcatgaataaacgttgtcagcctttttaatgtttccggacggacatcaggggtgacaccatgcccgaggttaaagatgtaacccggctgcgccatgccttcgtccagtatggcggccgccttttcttgaataacttcccacggggccaagagcacggcggggtcaagattcccctggattgcttttgtcacgccgagcgcgcgcgctttttggatcggcagccgccagtcgaggccaaccacatcaattggcaggctgttccattccagcgccagatgaccggccccgacaccgaacaggatgaatggggcattctctttttgcaatgcggtaaatatccgttccatcacaggtttaatataattgcggtaatccgctgcatttaaagcgcccacccatgaatcaaatatttggatggcactcgcaccggctttgatttgcgcttttacatacacaatgatcatatctgccagtttttccatcagtgcaaaccacgcttttggttctgtatacataaacgcttttgtttttcgataatcttttgaaggccccccttcaatcatataactggccaaagtaaaaggcgcgccggaaaatccgatcaatggaaccgtcaattgttcctccgttaacagccggatcgtctccagtacatagggaacatcttcttccggatacaactcccccaatttttccacatcttttaacgaagaaactgggttatgtataacagggcctgcccctttgaggatttcaacttccacaccgagggcggggagcggtgtcatgatatctttataaagaatggcggcatccacatcataatgctctaccggcagccttgtcacatatgcgcaaagttccggctgatgcgtgatgtcgaacagagaatacttttctttcagtttacggtactcgggctgggatctgccggcctgccgcatataccagacggggacgcggcctgcctgttctccccttgccgcttttaaaagggaatcgtttaagatctttttcttcaaatgttatcctcctcacgccacacagtcaccatttattttataataattcttttcaaataaaaactattttatcctgagagggcaatatctttttttactataatcgtttcaaaaagcattgtgcagccagctcttccaactgtcacaaatttgccgtattttgcttttccccggtttgtacgcgaaattcagcctgtgtccgctatcggcccggtttttccattattatctaattttttgccgtttccttccctccggcgcctccccggcacaggcagaaaagatgaaaaggcgtgagccgcttccctatttattaaccgctttcagccgtcgtctttattttgaaaaactttacaaattgaacagcggaaagatatacgttaaactggaagcaaagaggggtgatagaatgaatgcatatatcacaacgggtacttatgactttctcttaaaaataaaggaaaagtatcccgatgaaaagatggtgctgctgcagaactcggaacatgcgctgttgttgcacgaaacggaggggaaaaccgtttttgcctcgccacgccgttatcagctggctgcctccagcggaaatttggaagacggcatattcttcatttttacccatcttccgattccggatgaaggaaaaccggtttacgaattccacttcaaaaaaaacaccccggccatagaaagcaagcccggctttgcagcataccggctcctccgcccggtaaaaggggatacgtatatcgccattaccggctggaaagacgaagagagtttcgaaaagtggaagcgttccattgattatttgctcgtccacagcctggatctgacagaaattggcgcaaacaagatcacgtatgacgccccagcttttacaaaagaatatgtcatcccgcaagatgaagaggaaggataaacagatcccggccgcctgctcaggcagccgggatctgttgctgtaaccgcccgttaagcaggctgccggccggccccgcgatatacacggaccatttcaggaaccggaagaatgggcgattggaaaaattccagagcgggaaagtgggagtgccaatcgggaaaaaaatttagtccgcagcctgtctttccgcgcccggcctgcaaatcagccgcgaaaaaggcaggccagtacagagattcaaaaactaggtacactgatttgcaaaggttccggaacaggataggcaggtaaaaccgtgcctgcacgcccagcagatggcctgcggcatgatccggagggtggcaggcattatcgtgacagtcacccatttcttgcccccgccatatattgcatcaagaagggggcaatggaaatgggcattgatttgactgccattcactttgtatatttgatgtttattcttttcattatcctgatgatggtcctgaaaaaggatacgtcccttgtatgtattgccggtattttcatcattgcatggattgcaactggatcgttcactgcgtctgtcagcggtatttttacgagttttgtatttgcgatcaaagaattgctgcccatcattcttgtcatttccataatcgtctcgatgagcaggagcatgcttgataccggaatcaatgatgtgatggtggccccgttcgcaaaactgataaaagggccgaatcttgctttttggatcatcggctttttaatgctgtttatctcgactttcttttggccatcccctgctgtcgcgctgatgggggctgtgcttttgccggttgcgatccgggtcgggctgccggcgatcggcgtggctgttgccatgaacttgttcgggcacgggatcgccctctccggcgactatgtcatccaaggggcgccgaaactgacggctgacggcgccggcattcctgtatcgtccgtcatagaagcaagcgtcccactcgtcattgtgatgggcgtggtgacgaccgttaccgcttttttgctgcttaaacgcgatatgaaaaaaggcttgcttgctgccggagagaaaccggccgggagcactgcaccgcctgatgcaaaagtccccgggctcaagccggtatacaaaaaactttttgctttttttattcctgtgtttttcatccttgacatcgttgccatggttctttttcatttgcagggggatgcggcaaccgcactcgttggcggcacctcgatcatgatcttgcttctcattacaatggccggttcccgtaaaagcggctttgaaaaagtgacaaaatatttgatagacggcctgcagttcggtttccaggtgttcggccccgtcattccgattgccgcatttttctatcttggcggcgatggtttccatacgatgatcggcgccgatctgccgggcgcttcacgggggattgtaaatgatctcggcggcgccctggcatcggttatgccggtctcaaaagaaatcggcgcactgacaacagccggagtcggcgtcattaccggccttgacggttcgggattttccggcatttcgctcgccggctcaattgcagcgctgtttgcccatgcaatcggttcgggagccgccaccctgaccgcgcttgggcaaattgccgcaatttttgtcggcgggggaacgatcattccgtgggcattaattccagctgctgccatttgcaatgtcgacccgtttgaactggcaaggcgcaatttaatccctgtcatcaccggcctcattgtgacaacaattgtcgcgatgtttctaatctgaccgcagagcaggctggaaacggggcggctgaagctatggtctctccattcgcgcaggccaacagcggcccgtttagacacggtgctgtaatggatggagtaaggcgcccgtccattcacatatgccaacagcggcagcctgcatccgcaggtgccgcttccttttagctgttaccgcgataaagcagcagactttttcacaattatggtataatagtaaaaataacaggttgggggaatcgcagatgacagtgttggaaaaattacataaaaaactggacggtttttacccggaaatggtggagacaagaagatatctccatatgcacccggaactgtcctttaaagaagtagaaacagcccgttatatttctgatttttacaaaaacctcggcatccggccgcgcgaacatgtcggcggaaacggtgtcgtcgcccgtataaaaggcgcaaagccgggaaaaacaattgcgctccgggccgattttgacgcgctgccgattcaggaagaaaatgatgtgccctatcaatcacaggtgccgggtgtgatgcacgcatgcggacacgacgggcatacggcggcactgctgatgctcgccaaagccatacatgaagtgaaaagcgaattggaaggcgagtatgttttcatccatcaacatgccgaagaatacgcgccgggcggggcaaaagccatgatcgaagacggctgtctcgaaggcgtggacgccattttcggcacgcatttatgggcaacggtcccggttggccacatccagtaccggaaagggccgttcatggcggctgccgaccggtttgaagtgacgatccagggccatggcgggcatggcgcccagccccatctttcgaaagatgcagtcgtggccggtgcgcaacttgtcacgaatctccagcaagtcatcagccgccggattaatccgatccggtccgcggttttaacggtcgggtccttttcttccggcgatgctttcaatatcattgccgatacggcgaaaatcacgggcacggtccggacatttgacgaagatgtgcgggacagggtggaaaaagaaatcgaaaggatcatccaaggcacatgcctggccgcggactgcacatatgattatgactatttccgcggatatccgccggttgtgaaccatgaggctgaaacagcatttttggcggactgcgcaaaagaaatcgaaggcgtcacccaagtggaagaagtcgacccgtcgatgatcggggaagattttgcctattacttacagcatgtaaaaggcgcctttttctttacaggggcggacccggaaaaagccgacccggcctatccgcatcaccatccgcgctttgacattcatgaaaaagcgatgctcattgccgccaaaactttgggcgcagcagccatccggtaccagaacgcctgaaaaagcgctcaagcatcagcgttgccagcccggcttttttcctggcaagccgggcgttttgaaaaaccgctgcaggcgtaggggccgttttttcggcaaaaacttgcaattgctaatgcaaggggcggctttttggccggtggctgaaacgccatagacgggcgcattgctaaaaacggcaccggacggattgggcatgaaaaaacggcacaggctctccggcttgtgccgttttttcatgtttacgggcaggttgccacctgctttaaccgaacccgccgcttgcatgaggagcctgtgccgtttttttaagttgacggacagggcatgcactccggcccgacgttactggcgccggatttttccggggacataccaggcgacaagcagccaggaaaatacggctcctgccgcaagaacgaaaaggccgttcatccacaagccgttcaatgcggccgccgctgcaaaaatggccgtctgcacatacaggcagactgcaagcagccggataaaagatgtttcttttaacatgcggggcaccggataaaggcgcagccagatttttaaatcgtgggagccgatcatcggaatcatttggaaagctgtcaaataaataaacacgacggcaagaacgagcgcgagcacccgttcatggctgaaaaacaacagcacggccccgattgcggtcagccgcacaaaaagcccgaaatactggcttgtcctgaggaacgtgcgggcaaataaatattgataagtatgttcctggccgtatcggatgccggcgaggagcggatcgagccatttgcgccgtttgacctgccctttgagttccggcacgtcggcaaacagatttgcaaaccggtaaaaacccatcagccgcctttgctcgcgttcaatgagcgcatcccatctgagtgtccgtttttgggcgagccggtaaaaatacagaaacaagccgagcataacggcagccagaatgcccacaagaaagaggcttgcctcattgacaacgagaaacacaaacgcggcgcttaatgcaaaccggatgatccagtcgaaaacaggggcatacggttccggcagtttatacacattccagctcaaaagcaggttccacatttttaacgcgagaagcaggaccagcaggccaaaaaaacggccgaatccgtgccccgtaacagccgcatacatcggcatcaaagcggcaagtacaaacaaaagcagataagcttgaatactgaaagaaaacaggatcgcttttttaaaaaacgggcgcatccgcgtttccatcgggataaggaatacccggtccgcttcttttaacagcgtgtacaccgggctcgccgccagaaacagcccgagcaaaaggcccattacaagggcaacgggaaaatccggaccgagatgcttcacccagcggctatagtaaaaagcggcggcacccagcccgaaaatcagcacaaacagcaaatggtcattaaaaatataccgggtatagcgccttaagttttttaaataggaagcaaacctttctttccaaagaaggtcaatttcgttcatcgtcatcttcctttgtcaattggatatataaatcatccaatgttgcgccgggcatcgaaaattgctgctgaagctcttccaatgttcctttcgcgcggatccgcccgttatgcaaaatgataaatccgtcgcaataccgttctgccgttgcaagaatatgggtggacatcaggattcccgcccccttttttttcatcgtgcccatcaaatccagcagtgactggatgccgagcgggtcgaggccgagaaaaggctcgtcaataatgtacaggctcggctcgactaaaaaggcgcacataatcatcaccttttgcttcatgccttttgaaaaattggccggaaaccagccaagctttttatgcaggcggaattcctttaataaaggcgcggttctgtccgcataggttttttcatcgatgccgtatgccattgccgccagtttcaaatgttcttccagcgtcagttcctcatataaaatcggggtttccggtatgtacgaaaactgcttccgataagcgtccggatccgcgtttaagtttttgccgttgatcgtgatccgcccttttttcggctccattaacccgataatatgccggatggtcgtactttttccggcgccgtttaaaccgatcagcccgaccagctgccccgcttctaccgtaaatgaaacatcttgaatcacaggttttttcgtatatccgcctgttaaggacgccacttccaataatgtcatctaaagaacccctttgtgtcaaaagttctgatctgtaccgttattgtaccatgaaagcgttcatgactgaatgccaactgcgcgcctaaaaaatttttgcggtacgcatgtataaattccagccatttgcccatcctatacttgcaggggaaacatgcaatcggggtggttgtcaaagaccagtaacgatgctttacattagccataaccgacttccaggcatcttttacaatgaggtgctggcggtgaatctgtttaaaggcgatgcactttaaacgttacccaataaggggatgatcgcgttggaaaaagttaaggaagcccattatcaaccatatcattcgtaaatgaagtgttgatcaaaggcgcttttggctagttgaaaaaccctgcagaacggggcggaaacgcaggtttccgccccgtttccttttctttcgccttttcatccgttataatgaaatcaaaaaaatggaaaggttgatcaaaatgtgtattttttgcaagattataaacggtgaaatcccgagtgcaaaagtgtacgaaaacgagcatgtatacgcttttcttgacatcagccaggtgacaaagggccataccctgattgtcccgaaaatacataaagagaatgtctacgaactgacgccggagattgcccgcaatttctttgtatccgtcccggtcgtagccaatgctttgaaagcggcattccagccggaagggctcaacgtgctgaacaataatggcgagattgccggccagtctgtattccattatcatatgcacctgatcccgcgatatggaaaaggagacggcttcggggcagtctggaaaacacatgaaaaagattacagccaggaggacctccggcaaatcgccgcggagatttcccaaaatatataagccgcaccgggcagcaccggtgaaaaatcccatttttgcgtctttgcagccggtttcgcgcttattttattcagcggccatttgggctgctgtttttttgttgcgcccaatttgttcaaaacatgcgccactttttccgtctgcatgctataataaggttaatctttcgccgccggccatgagggtacggcgggaaagcaccagatgagatgagaacaggagagtggagacagatgaagacaaaatcccttgtcagcttggcgttgctcgttgggatcggcacggtattacacacggtgattccgggctttgtgttcgggatgaaaccggatatgatgcttaccatgatgtttatcggcattattttgttcagggagaaaaaatacgtactgttgcttggtgtgctgaccggcatcatttccggcctgactaccagcttcccgggcggttttttcccgaacatcatcgataaatgcatcacttcttttgctttttacggtttgcttctcgcgtccggaaaactggcaaaaaagctgccggcacttattgtattcacggccgtcggcacactgatttcgggcatcattttcttaggatccgcgtttttcattgccgggttgccagggccttttgccattttgtttggcaccgttgttttgccggcaaccgcgctcaatgcagttgcgatgtttattctttttccgatcgtctcaaccgttgcaaagcgcacaaatgccgcccacagcatacaagcgtgaaaatggccgccgggtttccggcggtttttttcgctgcgcagcttaaaataagtgaaacagagcggcaagaagcaggaaaaccattccggccgttccgaaaaatgcgatcctttttctgatgattttccgcggcggataaattcttcttttctggtacagcagcatgtgccggaccatcgcggcaaacaggacaacgccggccattaaaaagcagaaagcaacacgccccaacgaactccccctcttttctgcctggactattacatcatatgccctgatgcggattaacatgtaccagacaggggtaaagaacaagcagaaggaacgcgcaaagttcgctcttttgtccttcatcccgcctatgaaggaccgttcgcgtccaggcttggaatatcgctttgggcaagggcggcaaagaagaaagagaactttgcaaaaggctgggaaattctatatcatgaggataaaagaccattgcaggaggtgctttccatgaacaagtccagtttattttacggattactggttggggcaacagcaggcgctgtttccgtccttttcaccacacccgcttccggaaaaagagtacgggaagccatcaaaaataactccggtgatttcattgaatcagccaaaagaatcgccgaaaatgtgaaagacttaaaagaatccgtcgaatcgttttcaacggaaggcaaaaaagttgccacgaacgtaatggaggaactccaacattgtatcgaagaatggcaaaaaagcattgagccaaacaaagaagccctgcaaaatgaaatcaaggacatccggaaaacgattgaaaacatggaacaacaaatggagaaaaaatcttcctgaattttcgctgcccggaaagcggttgccgctttccggtttttttctttgctgttcatttcaaaaaaattttgtatattgttttttattactttttattttactggcataatgataatatatagggtaaggggtgatgggaaaaatatgacggaacaaatgttgacgaccaatgagtatcttctattttgcaaaagggtcacgcaattgtcgaaagcgctctggaaaacgattgaaaaagactggcagcaatggattaagccttttgatctgaacatcaatgaacatcatattttatggatagcctatcatttaaagggcgcatcgatttcggacgtggcaaaattcggggtgatgcacgtatcaacagcctttaatttttcgaaaaagcttgaggagcgcggcttgctcgaattctcaaaaaaggaaaacgacaagcggaacacgtatattcaattaacccataaaggaagagagatttttttgaaatcgctggaagcgtttaacccgaaaaaaagctctgtcatacagggcacaatgccgctatacgatctttacggcaaatttccggatatgatggaactggctgcgatcgtacgccaaatttacggccaggattttatggacattgtggaaaattccattttcaacagggagctggatgacgccattgaaacggaactgttggaaaaaccttcactgaaccgcttttgacccgtttcggacagctacaaattccgtttcaatgccttcattaattcaggatacagcccctgctgcaaacaggcggcaatcacttccgccggctgcagtttttcatgcagggaatccttaaacttttgaaaaagcggataaaaaaatacaaatttgtccgccttctgttctttcaactcatcgctcaaacgatcgcacaacgcataaaattgttcaatgtcctgttttgaaagctgtttttccataatcagcctgaaaaaaggatattggccggtcccgaacatttttaaaagcaatgtttgataaaattccagtctttccagcttttgttcaatcgattccattcagttccctcgtttatatgtttttatggttcagctaagaacagcgcggccccggctatagacagggcctgttttccggcaaggcccattgtcctgccggcccttaaaaacttccccgcggcatccgccacgagcggtacaagcagtgcctgttaaaaatgaatagtcgttcatccaccttgcatggaaaagatcagcgtgcatcacacatttgccatccgaaagacaggcggaacgttacgaatccagggttcaaaaccggagcactccgcctttattttactgcaaattttcgggagggggcccggccggcatgtatgtgcttgtttttttacaggttacgctttctttatattatactttatcaacgtattgacaagccatctatgtacaaaaaaagaaataccggaagaacaccagcccggatttttttggacaatcaacatcctcatgaccattttactgttttcctcctaccttggcattccataacagcgcacaacaagaaaggccggctgctgccggccccaaattttaccaagcccaggatgcaccaataatgatcaataaaatgaacaacacaaccagtaaggcaaagccgcctccgtaagctgctcctccgctcattccatccacctcctcttgtttcatacgtatattattcatccgcccctgtattggttaaggcttccgtctatttgccggcctaaatttcacaaatccgcaatggaactccacatcatatcctatgctgcaaacatccatcctgccctctgcaaacgcctgccccatatgaaaagaagattggcatggtgtgaaaattccataagaaacctggcaatccctttcttttctctttcaatttatgttatagtagtggttgtaaatctctcttgcacgacaaaatgaataggagttgtttttgaatgaagaaatgggtactatcccttgttttggcaggcagcgtgttcggacttgcagcatgcggcaacagcggcaacagcgccgtcgttaagacgaaagccggaaatgttaccaaagacgaattatataatgcaatgaaggataaatatggttcaactgtgcttcagcagcttaccattgaaaaagtcctgtccaaaaaatacactgtcaaaaagagcgaagttgacaaacaagtaaacgatgcaaaaaaacaattgggcagctcatttgatacagcgctgcagcaatacggttatgcaaacgaaaaagatttccgcaacagcgtgaaagtcagcctgcttgaacaaaaagctgcagaggcgacaatccatccaacggaaaaacaattaaaaaattattataacaatgatataaaaccggaaattagagcgcgccatattcttgtttccagcaagtcgaaagcagaagatatcaagaaacaactggataaaggcgccgattttgcgacattggccaaaaagtattcaaccgacaccgcaacagcttctaaaggcggagatctcggctggttcggtgcaggcgaaatggacagcgattttgaaaatgctgcatataagctgaaagtcaatgaaatcagcggccctgttaagacttcttacggctaccatattattcaactgaccggtgaaaaaaagaaaaaaccgtacagcgaaatgaaaaaagacgtcgtcaaacaatataaagcatcgaaagtaacaacggaaaaaatccagtccgctttgaagaaagaattaaaagcggctgacgtaaaagtaaaagatgaagatttgaaaacgacttttgactccctgctcgggacttcatcaagcaaataatgctgcacaaaaaaccgcccatccgattatgggcggttttttgtggccgttatgcttcatgggctttttcagcttcaccgctgcgcagttctttttctttatgcatcctttcaataaagacttccccttctttttcaatccattcctgttcctgttcgtgttcttccctggctgttttcaccgccataaacgcacatatgacgatgcccgccacaacaaaataaatccagatcgggaaatccatgtttttccctcctcttcggtttgtccctgctataatgtatggcgcaatccattaaaaaatgcctttcattttgaaaggcattttaaaattttttcaccggacgggcgctttccaaacgtttgcatttctatgaatctcactgatgaaacgccggtttgtaaaaagagcggttatcaagcgcataaatccggtccgagaattcgcccggtttgacattgcggagcgcacggtcaagcatattcattttcgcatcaatattatcaatatagtggagaatttccgcctctttaatcatcgggggcttggcgcttccccattccgctttcccgtggtgggagatcaccatatgttccagcaccatcacttcttctccgtggattccgagttcctccgctgcctttgcaatttcgctgaccataatcgagatatggccgagcaaattcccttcagccgtataagttgttgagaccgggccggacagttcctgcacctttcccaagtcatgcaaaatgacaccggcatacaacaaatcccggtcgagtgacggatagaggcccgcgattgccttggcaaggtcgagcatggagacaacatggtacgccagccccgatacgaattcgtggtggtttttcgttgcagccggatagacaaggaaccgcttctggtattttttcagcagatgccgggtcagcctttggatatttgggtttttcatatcaaaaatgtactgggtgatttttcctatcatttcttcctgcgataccggggccgtttcgataaaatcggcaatccggacgccgtcccccggttgtgccggatggatttggcggatcttcagctgcagccgcccgcggtaatttaaaatgtccccggttacttttacaatcgtctccggtttgtatgtttgttcgtcctgctcggtcgcatcccagagcttcgcttcgatatccccggtccggtcctgcaaaatcagtgttaaaaaaggtttgccgttgctcgcgatcccctttgttgcgtgtttgatgagcagaaacgcgtcaaactgctcgcccacctcatagtagagtagcccttttgccatacatgaatcctccgatctaacccctgattatttgtcttaaagtataccataatccggccgcaatccgctttttatctcaaccggctttgcttgtgtgtttccctgccgtgttgaaatacaggcattcggacccgcccctctttttacggctgaatgcggctgatgtttccggatcccgccatcccttgatcgtgtacagcccccaaggttttcaccccatggcctttaaaaaaccggagcatcggctgctggcatgtaaaaagcagcacctgcctcgattcgctcacctggtccagcagccgggccattttctctgtccggtaaatatcaaaattaacaaagccgtcatcaatgacaaccggggacggaaattccccgccgagcgcctccgcaagggaaaaacgtaaagcaatatacagctgttccgccgttgcctggctcagctcatttgcggcaaacagcacatcatcacgccgtttaacataaaaacggctatcctccccgcccatatggagggagacatacgatccgtttgttaaacattgcaaatacgcttcggctttgtgcaggacttgcggaaagcgggtttcccggagccgcttcatcatgccggaaagcaaacgttttgccgtggcataccgcgcccattcaaaagcttcttcccggaattccgaaagcgcgctgtaatattcatgcagtttttcggtaaacgttccgcctttttccaacctgtccagttcaaaccggatttccatcgattcttttctcatgctgcggagcgcgtttgccttttccacgattttttcttccagcttttgcttttcctgttccaacatagaaacatcttttaccgtttcgagccgttccaggtcttcccggctgatccgtaaatccatgatttccagctggccggacaatttttcgtattgctgaaaaaggctgccggctttccggaaatcttcctcattcacggcaccggcaagggcaaaaagctttttgatctcattatctgttgcttccgcttccgattcaagcagctgcacttgttcttccagctcggcacatttcttttcccattcctgccggcggatttttctttcctgttgttccgcacaggcttgctgcagcaacaagatgccttcctggcgcaaaggccagttgacatggagccgggaccacagtttttccatcctttcttcaaatgccgaacgggaatcggcaagctgcgccagtttcttttcgatacgcgtccgctcgcgcattttcccgcttaattccgtcaaaagttggaatgcttcgggcagctgtcttggccggaagccgtcacccaattgcaaagtttgcctgaaacggctgatttctgccagcagctgtctttcttccgcttccaggcgctgtttccggttttgcatttgccggccgttctgttcgccttcctcaagtttcaaaatgagctgtttccagttttcgcgcagctgtttctgccgttcatattcatgccagtccgtgtccccctctttccaattccgcagttctttttccttttcccccagttcctgttcgagcgcgcggatttcttgttccaacgggttccggtttcccttgaaagcatggtagcctgacacgattgcgccgagcacaaaaacgcccaaaaacaagtattgccctgtgagaaaactccacacgccggccatcagaaacaataatgcaaggccgaaaaacaggaaagggggcttccggacctcatccgccatttttttcaggcgggaaagctgctgtttcccgcgcctgatatcggcttcaagcaatgattttttttccttttcctgccgctttgccgataaatcgcgaaaagcctcttcggatacgagctctttttccaaaagtgcgcattcctgctcaacagcgttcatccgggcccgcaagtcctcaagctgtgcctgtaaagcatcgctgcgggtacggtggcggtcatacgcccttacgagggtgctgagcctttcttttgccgcaatgcttaagtcaagctgtggaactttttcaacttgcgatgccgtaagatgcagcattcccgctaattcggagatttggctgtccaggatgtcgcattcagattggaggcgctccgtttccgcctgccacccgcggtattgcggccagtcatcaagcagctttttgatctccccttcatgcctgacaaaaagcgggtccggctgctctccttccattttttccaccagcacctgtttctgttttttaacggctgacaggcgcccggaagaagcgcgccattccgacatcagcccgtcgaggcgccggattccgtcagcggggaaacggacggggccgatttccgaaagctgcagtttgacatgctttctttccgcatagagcggccaaaggcttgtgaggtgttcatactgctgaaccgttccccttaaggcttccagctccgcttccgcttctgcctgtgctgcttcaagcgctgccagccgggctttccattcgccgtaacggccgttttccgctttcaggcgattcagttctttttccatagcctgaagtttccggagttgcacgttcaataccggtttccgcccgttcggtttaaaacgcgcttccatttccttttcgagttcccgttccgccgaaagcagcgcatccgtcccgatcgtccctgcggcaaataaatagcggctgatatcatcgcctgttaatttgcggatttcctggaggctttgcagattaaaagaataaatggactggaacatctgccggttcatcccgtttaaaacatgtgcaagcgcctcttcgccgcctgttctgccatttgcaaaagtgacggacacttctccggctgcccttccttttatccgttccaccgttatgtttccgtctttttctgtttccaggacgagccgcccgccgtacaccgctgaaaatttcggctcatagcgctgcccgttttgctgccttgaaggaaacccgaataaaacggcttcaataaaagccatgaaggttgatttgccggcttcgttttccccgtaaatgacctgcagatctgaaaggttttccatatgaaaatcaactagccggccaaaaccgtatatatggacctcccgtattttcatcgtttccccctgcctttcaacttctcaaaaacagccgcttccgcttccaacagaagcctctgcttttcgtctccgtccaagtccaggtagcggcccgcatacatgtggctgtacagcggggagaccgcttcatctatggaagtttcttccaattgcgccagcgtcttcttcatttcctgcaaaataaaaccgtcatcccgttcggataagagggcattttcaggcagtgtgatgcggtgtacccagacaaagttgcggtctgcttcttcgccttcctgcagtacttccatcagctcgccgtttttcacttttccaagcgcttcatcatccagcaaatccggatcttttatctccaattgcaaaaatacgccctgcgcctcttttctttcttcttcaagggcatggcggcaagctgtgtaaaggctattaaaatcattagcgccttttgcggaaacggcgcgcctttcccataaaatatctgccgtctcatggaacgcggcatgcgcgccaagcggatccatttcggcaaccatacagcctttcgggcccgtttctttccggtttctcccctggatattcccgggataaatgatatagggatccgtatgtaaaatctgctgtttgtggatatggccgagcgcccagtaatccatccccttttccagcaaatcccgcaaggcaaaaggagcataaggctggtgcattttcgtcccgccttcaagataaccgtgcagcatgccaatatggaaatcggcctcccccgttttcctgtattcatccgttttattctccagcacgtgccgcttcgggtagctgaacccgtacatatggactttcgacccgtttttagctgtaaaggatttggtttcgacacgctcggaaaatatctggacatttccaggcatgtccagttttgtccatgacccgcttaaatggtcgtgattgccgtgcagcacaaatacggcaatgccggcctctttgagccgctcaaactgcttcttcagcctcacctgagctttcaggctgcggtcttccccgtcgtataaatccccgcatatcagcaggaaatccgcttctttttcaattgtaaggttacaaacattttcaaatgcccggaaagtgctctcctttacccgttcaaacagcgccggcggaagcttgcgtagccccgcaaacgggctgtcaaggtgcaggtcggccgcatggacaaagcgaatccttttcaacgccatcactctttcgcgaaaaaataaacggcagtttgccattttattgtgaaatccaaactgttcgtaataaaacacatttcacagaatatatgttctatctccattataaaaggtttggcacgttcaggcaacaaaaaaatggctgaacatgccaaacccgtttaattgtattgccggtagacgtacggatctttcggctcgctgcttttatggtaacttgttacttttaaatacgggatattctctttaaacggcgtatagtacgtcatatccagtttcccttcaacctcaatccatgtattttttttcacgtttgccatattgcccggaaaatcaacgagcatcccgtatacgccggcatcggcaatacagtggataatgccaaaccggagcacaaacagctgattcgctttaatatcatccgtccggtagacaaacccttttatcgccacctttttgccgataaaatcccccggataattgtaaatcgtttcaagcccgtggaagtaatggtcatcatcgaggacgatgctttgcaatttgctgtacttttttaaatccgaattttccatttctgtatactggtccttatcatagtaaaggctggaattcggccgcaaaatctggtgattggcatactggtccttgtcattgtcaatcatcgaaaagtggaagccttttgctttgacaacggtggaattcaaggtggccaccggaagaaaaatgcccgttacaaccgggattaaaatcatgccgtacgtaaacacttttttgtaccatgtattttcatccgtttcatgggaatggccgtggtgggcgccgtgatgatggtcatgcgccccgtttcccgccctgacccatttcacgagctggtataaacataaaaagcccattgcaaaaatcatggaaaacgacaaatacgcatacttcatattgatatatttgctaatatcccctgtcgcgtgcagcttcataaaaaaatacgcgaagccgaacaatacgataaatcgcaacattttaaacaccttctatattaagaatgcacccgtaaacacaaaaacgataatcagcccgatcatcgaaaagacaaactttcttttaaatgaatgcatcatcatgagcagatttttaatatccaccatggcgccaaatactaaaaatgcaagaatggccggcgtcccgaacatcccgttgaaagacgaggcaatgaaggcatccgcctcggaacagatcgacatgataaaagcgagcagcatcataatcagaatcgccgccatttttgtctgtccgagcgacagcagcgtactcgtccggaagaaggtctgcatggcggcagaaatcaggccgccaaacacgagaaacttcccaacggaaaaaaactcatcaatcgcatggtcgatcgttccggtgattttttgcagaaaacccggtgcatgctgtacttcgcggccatggtggtggtgcaatttggcctccacaaattcgcgaagctggttttcggaaaaaaaataagaaatcgcaatcgcggttaaaacagcagtaaaaatcgccagcccgcaacgaagcagtgccattttccaggaatcgccaaacgcgacaaacgtagaaaaaatgacaaccgggttaataatcggccccgtcagcataaacgcgatggcagcagaaagcgggacatttttccggacaagcctttccgtaatcgggacaatgccgcattcgcaggccggaaaaagcgcgcccatcccggtgccgaatgcaatggataaaaagcggtttttcggcatcacttttgcaatcatttcctcagtgacaaacatctggatcaccgctgaaatgaatacacccagcacaataaaaggcaacgcctcgatgataatgctgataaaaatggtattcatttgcaataaggactggaccataacagcatatcgtctccttttttctatcacactcacaaaaaaactctcccaactaggatactataagtcttctttggcgtaaatgaagaaaaccgggaaatggcgggcaagcaggaaaaccatgtgaaaaaatgattgccaatttgatgaaacccatgcgattctattactttttgggccggactgtgttatgatagtgtcaaatgaactagtattaagaacgtgaagggaatgaagcaattgccggtatctatatttgactttgggttggttgtttctgccggggcttttgttgcgctgcttaagatcattatgatcgatatcattttatcgggcgacaatgcggttgtgatcgccatggcgacccggaaactgcaacgcgaacagcaaaacaaagcgattttctgggggacagccggtgcggtgattttaagaattctgctggcaatggcgatcgttgctttgctgaaaattccttatgtaaatgtcattggcgggcttttgcttctttggatcgcatataaagtgctcggcggcggagatgaaaatgtccaagtcagagcaaaaaatgggctgctcgtttcgatcggcacgattatcatggctgatgcaattatgagcctcgacaatgtggtggcgctggccggtgcttcaaacgggcatatcggcatgattgccctcggcgttgccatcagtattccggttatgatattcggttcaaagatgattgtaaaagcgatgaaccgttacagctggattgcctatgccgggtcgggcatcctcgcctggacagcggcggaaatgctctttaaagatgagcaaatcctgaaatggctggatatatcacacgggccgttaacgtatacgatcggcggctttcttacggttttggttttgtttcttggctggctttcgaaccgtcggacggcggcaaagcaggttaagcaagtaaaacaggatataaaacaggatgttaagcagcatgtccatatccattaatggcgcagaacttacgccgttccctattaaaagaacccgggctggattggcccgggttctttttaccggtggaacaaaatcagttttccttcaggggatacgcaacggtgcgttttctcatggacgcctttttcttttaaaagcgcctccccttttttcttcgcttccgtgtcatcctgtgcttcaaaaccttcatcgagaatcttttcccctgtcggttcaaaggcagtcagtttatagtcgcgcatgctttcactcccccttgaattgcggcgccctcttctctacaaaagcgcggatgccttccttgtggtctttcgtctggcgcattttccactgcgcatgtttttccagttccaatgatttattgaagtccgggcggttcagttccgtatagatttttttcgttttgatcatcgcgaggaccggctttttctgccattctgtaattttttggtcaacggcaagcgcaagatcgggtaccgcttcatcgataatgcccgtttcggctgcctcttcagcagacatgacttttccttcccaaatcacctttttcgccttttcctggccgatccggcgctgcagcaaatagtggccgccgccgtccggcacaaggccgatcccgataaagttcatcgcgattttgctgtccaaatcgctgataatggtatcacaggcaagggcaaggcttaagcccaatcctgcagcagcgccattaatcgccgcaatggtgagtttcggcatacccacaagaatggaaacggcttcatttatttggtccataaaagagatgaaccctttttcttcctccatcgcaagcatggctttgatgtccccgcctgcggagaatgctttgccgtttccggataatacgagaatgtgaatgtcatccttcatcgcaatcgctttcaacgagtccgccagttccttaatcatctccaggttcagcgcattcattgcgtccgggcggttgaaatacaaataggctgccccgtctttttcctccacctggattgtttcatacgtagaaatcaccgaaatccctctccctttgttttattcttcctattactaggatagcgaaatattcggcaatttccaatacaaaatggcgtctttttaaaaaattcatcaaaaaaagaggctgccgcctaagcaaacagccccttccatccttatttcagcagtttcatttttttcaaaaagtcaatcggctgctgtttccggaaatgctcttttaccatataagacactccgttttcattgttagaacgggtcacccagtcggacgcgtttttgacagcgggatgcgcattccccatcgcaacgccgagccctgcccactcgacaagcgggagatcatcgaggcccgaaccgatgacgaccacttcctcacggcggatgttcatccggtcgcatacatataaaagcccgcgaagcttggaaatgccagccggcacaatatccagcttcccgttcccgcacacaatgcaatccacttcatggaacatattggcaattgcttttttggcagcctgaatgtcctctccgtcggaaaagatcacttcgattttgggcggggaaagcggcgtttgttccagttttgccgataaatcgtccacatattgttctgcataagaaaacggattggacgtttgataaatgacttttcccatcagcttattcggatgcttcaccctgtttgacaatgtaaaccgctcggaaacaaggcggatttgggcttgaaacccttccaaaaaccgcacaaggtcacgggtggcctcttcgctgatccttctgacaaaaatcggtttatccagttcactggcaatataagcgccctggtgcgtgattaaggaagaatgcagcttcagccatttggcaatccggtgggccgaagcgaaattttttgacgtaatgagcgtcaccgcaatgccttttgcacctgcatactcaatcgcttctttcgttgttttgccgagccggccgttatcctgcagcaatgttccctcaatatttaacgccagcattttatagatcatggatgctccccctcttcatgatgctcccggctgccgggctgatttttcacacagcctgctttcttttacagatgtatgagaaaaaagggggaaatagaactttccggctgcattcttctactttccgttgtataaatcttcgacaggcttcatcagcacctgattgatttcgctgagcatatcgcttagccgctgttcagcgccgatcaactgcataatggcgggatttgcctggaccgcttgcatggcagcctgcgcctgcttttcatcttcttctgtaaccggaagcccctgcatttgtttatcttgcagattgagttgaagctgcctgaaacggtcaaacaatgctctcgcctggccgtttgaccggacattttcgtacgcctgcttcaacgcagcaaattcatggctttcccggattcctttttcaagcatgcgcgcgtattcatttaaatgggatggcatgtaaatcctccttatgttttattcatcacggatggtttcccggccttgctttcgttacacaaggagcagccgggccgcttgaagcctgccacggaaatgcagggatgcatgggtttcctgttttctctttcctgcacgagcagcaggatcaggccggcgttattccaacaatgcgccaaagcttgcttcctctatacaagcagcacgatcaccccctgaacgatcccaatcaggccgcccagtaacgcgccaagatacgtaatcattgaaaattcgcgggcggtaatgccgagaatcagcccttccaggcgctcaatcggaaaagattccacttcctggcgcacaagatccgccacctgcagcttccggatgatcaaaggcacgtttttgctgatgaagtgcagcgctttttccgccaatacagggatccattcttcttcaattttattccggtaccgggcaacaaatgcctggacgggtgtgtctaaaaaacgttcgacaggaagggcagataaaatatttttctccagccatccgctaatttcttcatccggtagatccggcaaaagttcccctgcctgttttgctttcaggccgttccattccctttccagcatttccgccattgttgctttcattccgggttcctggagtgcccgggtgatctcaggctggattttatcggcaatcgaagtgtttccgataaaacgtttcaccatcgcgccgatcatgccgcggtcatcaagaaaatggctgatcatcccttcaattttcgtgcggccagcagggcttgaaatgtattcgctaatccttgcaatgatcaaatccgccaaaacagggattttttcttcagcttttttgatcacggcttccggcagcagtgcttcaagcgtttgcggtgcgatatgttgttttgcctccccgtaacgggtgcggatgaattctttgatcccgttttgaacacgctccgccgacaaatccgctttaaaaaaaccggcaatttgcggggtcgtccagctcatctccagccatttcaaaaaagtatccgccatccattgggccgtctctttccggaacccgggcgacagcagctttttttcgatgctttccggggtgaccagatggcgcaccaccatttcgccaagctgcttcgcaatctcttcgcgccttttcggaatcaatccgggcgtgaacggaagccgccaatttttaatatagatcgcctcgtacggccgaaacagcattttaatggccagataatttgtgaatccgccgatcactgcccccacggcagtcataaacaaaatttccaaaaatgcatgcatacacaatcatccctcattgttttcgttgtgaaattttttccaaagaagcacgggaagtttccagcccgctatgcggacacaacggtcgattttggttctatgctgcggaaaaccgcaaacttaatgaaaaaatacccttttttgcggccgggtatttctgaaatcagctattttttttgaaccgattttctgtactaatcataagatatcagcaaaagcccaataaagtcaaaaattagccgtgttcgtgcccgtgttttcaggaggaagggaggggaacggattggcatcaaccattgcattccggcatgacgatgaaacgaaaggcgcggcggcggcaattccacgggcgctcctttcctttttgcgcatttcaaacggcgggctcaccatccggttcggcggaaaaacagccacagcaaaagtggaaaccgatgcatccggcaaaacggtaatgatgctctctgcggatggttacaaacacctgaagctccctgtcccgcccgcccggttgaaagccttctgccggcagggggtgcttgaacttggcccggtgatcgccgtcctgacagaacttactggaagtgccccttctgaaaacatccggccattttgcgaagaactgcaccacctgatcgaaaaagaaggcggctgcctttttgtggaaggcttggattcccgcgccggcaccggctgcacgttttccgccaatggctggaagacgggggaagtgccggaaccggacattgtctataaccgcattcattctaggctggctgaaaaaagccgccagtttggaatgaaaacagcagcgtacaaagaaaagggaaccggtttttttaatgccaagtatttaacaaaaatggaagtttacgaatgcctttatgcaaaccgatttttgcggtcgtatttaccggaaacttgccggtacggtccggcgtgcctagcggaaaaacttggggcattcaatatcctgtatgcaaagcccgaaaacggaagccaggggcgcggcatcatccggattgaaaaaaaggaaagccggttcctccttggccatacgcaccaggaaaaccgtttgccggaagttgcagaaaatgtggaagacaccgttcaaaaaatggaacaactcaccggaacccttccgtatatccttcaacaaggcattccattgctttcggcagatggaaggcaaaccgatttccggttccttgtctggagaaccggcgcaaaaaacgattggcagatcgcgtcatccctcgcaagaacagcggcagacgatgcgattgtgtcaaacctctcacaaggagggcttccggcaaaaccggcgccgcttatcttccatcattttggaaaggaaaaaggccggctcgtgctggaactcatgcatgagctggcggaagccgccgccatcacgctctgttccgccggaaacgggcactttgcggaattcgggatcgatataggggtggattgggatggaaaaccgtgggtaattgaagcaaacgtaaagccgtctaaggccgcgtttggcgtatcccgcggcggcatccgcccatccgtaaaagcactataccgctacggtttatttctatggactgaaaggggaatggaacatgccggctaaattaggcattcttacgctggatcctgcttcccggcaggattattttgaccaaatggcacatgaatcaaaacaatatgggaccgatctttattcattctccccccttgatttactgcccggcacgcagaaagcaaagggacttcattttgacactacaagcggcatatggaaagaagaagttttccagattccggaattcctttatgaccgctgcttttacggcgaagaccagccatcaaaagatgccaaaaaaatcgtcgcatggctgaaagaacggaaagaccttacctttctcggatacgggctgccgaataaaaccgcgctttacgaccgtctgaaggaaattccggaaatctccccgtatttgccggagacagtaagggcggacagtacggaaacggttttgcgggaactgaacaaatatctttccattattttaaaaccggcaaacggtgcgcatggatatgcggtgtattccctcgaaaagaaaacgggcgggctgcttgtaagaacgacgaaaaacggcagtcttatatcgcagaacttcggccgtttggataaatttcaagcgtggctcaatacactgctcggaaagcatgattttctcattcaggcaaggattgacaatatggaccggaaaaaccggccttttgatctgcgcatctttttgcaaaaagacagccgcggcgagtggcaggaagtgacgcggggcatccgtaccggcatggaaaacggcattttaaccaatttgagcgcgggggcaagcctctcaacatacgggaactggcaacgcgaaacgccgcattttaatcatgtctatatcagccaggaaatctctgacatcatcagcatcttgccggctgttttggaagaaacttttcaaccgctatttgagttgggaatcgatctgcttattgcgggggaccaatccatctggatactcgacatcaattcaaaaccgggcagaaaaatggtcagccttctccatccggaaaaagccgggcaaatggctgaagccccgcttgcctactgccggtatttacaggaaatcggaaaccgcgtgcaggccggaaatgtgtaaaatgaaagaaatgggactgctctttagcggctatgtgaaggaacagcgcgttttcgacagccttttcgcatagaacgcgcctgtgtttaaggaacagcaccgttttcgacggctctccttcacacagagtgcccataagaaaccgggcaattttggccgcatagaacgcgcctgcgtcaagaaaccgggcgctttcaacggcataccttcgcatagagcgctcctatgtgaagaagcagcgcatttttcgacagccttttcgcatagaacgcgcctgaatttttgccacattgcttttgaaacagaagggaacccgagaaaaagagccgcgatagtagccggaaaaatttggttggttcatttcatccgctgccggtttaacaaaaggtcatctaaatgaaacgaggtgctttacaaatggccagaaaatataaaattgagttttttgatgcctccgacccgatcctgtacacgccgcaaagccttccggtacttgaaaacaccggcaaagtggcattcggctctaaaatcgctgccgcaaaaatcgaaccgcatccaaatggccgcaatgttttttccgtctcaagcgcgcttgccggtgaactgagaatgcccgcctttttaacggttcttcactgtttccaaaacagcgatatcctgatgctcggcccgcttgtcggcatttttacggccggcttcaccccctttgaaaaccgcccggccggtgcaaggtcggcgtggtttgcaaaacttctttccgcccagtctgctgcctgcgtggtgccgtttttatttggcgaacagcatatcgattgggaacagggtgtgatcaccggctacttttacgggaaagcgggctgggaaaagcaggaagtcccgtttcccaatgccatttacgaccggctcccgaaccggaaaagtgaaaaacttgtaaatgcgcagaaaatcaaagaaaaattggaaaaagaatattttattccgtggtacaatcccggctttttcaacaaactggaaattcacgagcggctgtttcaagatccggaagcgcgcccctatttgccggaaacgaacccgctcacctcttttcatcaaattgaacggatgctgtctgattacgggatggtctacatcaaaccggtgaacggcagccttggccttggcgtccatcaaatccattaccaccatgcttccggcgcgtattattgccggtaccgggacaccggcaaccgattgttaaaattcagcagccttgaaaacttgatcaaccatgttttttctaaaaagcaatggaaccggctgctcgtccagcagggcatttttctcgtaacagacggagggcggccggttgatttccgggtccataccaataaagacgagggcggaaactgggtcgttacagcaatcgcggcaaaagtggccggcccgggcagcccgacaacgcacgtgagaagcggcgggttaattaaaacacttcccgaacttacggaaaaccccgagcaacaggagatgtaccggcatgcgctggaaacagccgccctcaaactttcccgcgccatcgatgaacatgtcgaaggagtgattggggaaatcgggtttgacctcggcatcggcacggacgggaaagtatggctgtttgaagccaattcgaagcccgggcgctccattttcaacaatccgttcatgaaagcgtgcgatttattgacgcgcaaactgagcttatcgtttgccgtttatttgacggaacggcaagtgcagtcaccaggggaaatgttcccatgaccgccatctggtttgaccgcaaggaaaaaatatttaagcgtactgccccgtccccgcttttttggggaaaagaagcggaactgcttcctttctccacgaaacccggagaggaaacgccttatcgtctgatgttaaaaggggcatcagccggccccctgatcgggatactcatcagtaaatcaaagaaagccatcagcggagaccgtgatttttttatcgccatccaacaaacattacaggaaaaacagggcggcctgtcttttttattcagccttgccgatatttcagcgcatattaccggcgtgttttgggatgtaaaacaagaaaaatggcacagggcaatgtttccgtttccagacgtggtttataaccggatccggaagcgaaaggaagaattggaggaagatttccgtcgatttaccaggcttctccggcaaaaaaggatcccttttttcaacccgcattttttaaataaatatgaggtgtacgaaaaattgaagcaggatccggcgattgccggttttcttccggaaacggcgcttatttccgataaaagcagctttcacgcctttttactgaagcacaaggatgtctatatcaaacccgccgcccgttcgcaaggatacggcatccgccgcattgtgcaggggccctgtgaagcatggacattttacacgccccaatccgcccacttgcccgccagcttttcggatgtgtgggaggagattggcccctttgcagaaaaagaaacgtacattgtccaggaaaccgtgccaactgcattgcttgacggccggaaatatgactaccgtgtccacgcccattacaacggaacaggttaccggataaccggcatcggcgtgcgggttgcccaccccggcggaatgacgacccatacggcaaaaggcggggaaacgctggtactatcttccaatgaaaaaatggagattaaaaaaaagattgcgccggtcatttcagcatgcggcaatgctttagcggaatcgtacggctttttcggggaatttaccgctgacatcgcgcccggcaatgaaggcggcttttatttgtttgaactgaatgcaaagccaatgtcctttgatgaacctgaaattgaagcagcaaaaacccggaaacttgccgatttgttttatgccattaccggctttttggaaaaatgattccctctctttaaaaaatttgagtaaaatagattatatccaatgaaaaaccgagggatccaaacatgctcgacagattaaaaacaaggtatccaaatgcctgcattgcagatgaaccgattgcagcgaaacctttgttatggttttggatggaagaagaaaaacagtatttcgggattgatccgggcgaattgacgccggaagaaacgatgctgttgaaaacattattccccaaattccgggaaaatgctccaggcacggcgggcgaagcatccaaatggtatgactacctgtttttgccggatgccgaggcccctgcccgtggcggcgtataccgcgttacacagtttgcgctggcaaaagaagggccggatgtatccggcgttcaggaagccatcaaaaacatgtttgtgcatgatgtcttggtgatgatgaccaatcagcttgaaggcatggtgattgaagaaaaaagcggaacagcagcggccgaagacgatctagaggcatccatccgtgcgtttgaaggggatttctatacccctgttttgctgtatttaggcgaatttaaggaagtggcggcattaaagcgcagcttccaattcgaacgccggcttttcgaatttgccaaaagccgccggaaaacgtccgctttgttcacggctcatgctctgctccctctttatttgctgtcccatttgcctgaaggggaaaagggcctgctcttccaatcactgcgcaggctgtttgaagaagaccgggaaatggggcaaacgatcaaacggtatcttgaaaattttgcgaatgccagcctgacggcaaaacaattgttcatccaccgcaattccttgcagtaccggattgaaaaatttgaagaaaaaacgggcttggatttaaaacattttacagatgccatctttgcgtatttcgcctgtctcgaaacctttgacggcaactcccaccgataagccgcgcgttatttgccttgaaaaggaaacaagcccgttttactcaaaatggcaccagttggctaaccggttgtatcaagagcggcataccggcatcgtatcccatgttgcaatgaatgccgcgcaaccggaagattggaaaacgagccgctttcaaatttccaaggatcccggcccccggattttactgcgccaatctgccgggaaaacgggatgggcagggtgccgaaaatcgccctgcattttttgtgcatcctgccgttccctttacgaaagggttttccttataataaagacaacttatgacaggggagggtttttacgatgacagaactggcgcttgagcatatttataagatttacgacaataatgtaaccgctgtatccgattttaatctacatattaaggacaaggaattcattgtatttgtcggtccttccggctgcgggaaatcgacgacgctcaggatgattgccgggcttgaagaaatttcaaaaggcgatttatacatggacggcaaacgggtgaacgatgtagcgccgaaagaccgtgatatcgcgatggtattccagaactatgcgctttatccgcatatgacggtatacgacaatatggcattcgggctgaaactccgcaaagtgccgaaagcggaaattgacaagcgggtacaggaagccgcaaaaatccttggccttgaagaatatttaaaacggaaaccgaaagctttatcaggcgggcaaaggcaacgggttgccctcggccgcgcgattgtaagggatgcaaaagtgttcctcatggacgaacctttatccaatctggacgcgaaattgcgggtgcaaatgcggaccgaaattgcccggcttcaccagcggctgcaaacgacgaccatttatgtgacacatgaccagacggaagcgatgacgatggcttcaaggattgtcgtcatgaaagatggtgtcatccagcaagtcggaacgccgcgcgaagtatacgacttacctgccaacctgttcgtcgccggttttatcggctcgccagcgatgaacttcttccgcggtaaactggacaacggcaaatttcacttaaacgaatcggtccagcttgatgtgccggaagggaaaatgaaacatttgaaaagccatatcggcaaagatgtcattcttggtgtccgccctgaagacatccacgatgaacctgttttcattgaaacaatgccgggctcggccatcaaagccacgattgatgtttctgaacttcatggcgctgaaacgatgctctattccagaatcaacgggcaggagtttatctcccgcatcgattccagaacagttgtcaaaccgggtgacgaaatcacgctcgggcttgatatgaataaagcccatttctttgatgccgaaacagagttaaggattgggtgaaccagaaagcctgccactgaaaaagtgattttttatatccgtatatccaacatataaaatgcaaaaagacgttgaaacacaagcagcatgagtgtctcaacgtcttttctatttttggggtgctttttcagtgcctcgctgttatatccggctttttgattttctccgcaatcgccgccaatagttaccagccgggaaccagtataattaaaattttttcctccataatacgtagtacatcgatcacattccgctgggttcaaccaagaaggtggcggggaattccccgcttgctggtgcaattccagccggcccaaccaaaaaacttacaacaaggagatgacacagatggcaaacaacagcaattcaaaccaattgttagtttccggtgctgagcaggctctcgaccaaatgaaatacgaaatcgcacaagaattcggcgtaaacctcggcgcagacacgacatcccgcgcgaacggatctgtcgggggagaaattacaaaacgccttgtgcaaatggctgaacaacaacttggcggtactttccattcgtaatataacaaaccaataaaatggctaaaaaaaggggggcaaccgcctccctttttatcagtgatttaaattgaccattttttccggcacgatccactcatcatattgttcttcggttacataacctgttttaatggcggcttctttcagcgttgtgccttccttgaaagccagtttcgcgatctgggccgctttttcataaccgatatgcggattcagggccgtcaccagcatgagggaacgattgacattttcccggatcgtttccacattcggttcaatgccgcgcacgcatctttcatcaaatgacttcatcgcatcgccgagcagatggacggactgcaggaagttatatataattaccggtttaaatacatttaattcaaagttgccttggcttgcggcaaatccgattgcggcatcattcccgaatacctggaccgctaccatcgtcaaagcttcgcactgggtcggattgactttgccaggcataatcgagctgcccggttcattggccggaatcgaaatctcaccgatgccgcttctcggcccgctcgcaagccatctgacatcattggctattttcattaaatctgcagcaagcccttttaatgccccgtggacatgaacgatttcgtcatggcttgtgagcgcatggaatttgttatcagaagaaacaaacgggtagccggtttgtttttctagttcttccgcaactttaccgccgaaagtcgggtccgcattaatgccggtgccgacagccgtgccgccgatcgccaggttcaaaatatgttttgcgctttctttgatcatgcgttcgcttttttccagcatggcacgccagccgctgatttcctggccgagagtgagcggcgttgcatcctgcaaatgcgtgcgcccgattttgatgattttcatgtatgctttttctttttcaagcagcgtttctttcagctgttccagcggcggcagcagccttgtctgcagttcatggtaggcggcaatatgcatcgcagtcgggaacgtatcgttcgagctttgcgacatattcacatcatcgttcggatggacgtgttctgcactgttttgggcggaaaggatttcgtttgcccttcttgccaccacttcattcacattcatatttgactgggtgccgctgcctgtttgccagacaacaagcggaaaatgcccgtcaaatttcccgtccagcacttcttcacaagcctgaacaatagccttcattttggcatccgataatttgccgaggcggttgttgctgacggcagccgcttttttcaaatgggcaaaagcgcggatcacttccatcggcattttttccccgccgatcgggaagttttccttgctgcgctgcgtttgtgccccccaatatttgtcccgcggcactttcatttctccgagtgtgtctttttcaatccggtactccactttcttcccctcctgtatgtgcttacatttggcttttgcaaaacggcggcaagcctaaaaaacttgccgatatgtagctgcaagtttattttactataaattcccgcaaagcaacacctcaacgctcgcgagtcgctgttcaattcctttttgagaacatattttcagaaatcttgcaccaaaaaagcggcatatccgttcacgagccggccaatgccgtacatttaccgtttgccggtgtcacagtcctgaaaaaatgcctgccactctccggatttgccggattgtaacagacatcataccccgctaacgaccgcttgaacggcacccctgctgactcaggccggccgttttttcaatgcattgcgggttgctaccgccctgagagcctgttcgcaatggtgtgcacttattttatttcatatattcgcggatcaaaataagaattcgacagcttcaatactagttctgtttcgtcataacccgtattcaaggcttttccctctctatctgccttttgattttcatgatctcgtcttcactcaagccgaatgcttgggcaatgacttttacatccacttgattttttaacaagttgataataaatcttcttaacctttgctcaccttcttctctttcttcttttcttccttcctctttcccctttttatacccgcggtcaaagtaagaatttggcagctttaatacttgctccgtctcgtcataactcgggttcaaggcttttcccattctatctgccctttgatcttcatgatctcgtcttcactcaagccggatgcttgggcgatgaccttcacatccacttgattttttagcaagttagcaataaatcttcttaacttatcttccccttcttctctttcttcttttcttcccttctctactcctatttcaattcccttcttatacccgcgatcaaaataggaattcggcaagtccaggacaacttcttttccatccacaccgggaaatctgacttccatcttatgaatgctccagttgctgttttattttttccacttccgtctggctcagaccggttttttctacaattaattgaagctccatacccgccagcaacattttgatggcaattggaatcgtttgcagcaatttttttctttcttcttctcttcccttctctacttgatgctagtatagtttcnnnnnnnnnnnnnnnnnnnnnnnnnnnnnnnnnnnnnnnnnnnnnnnnnnnnnnnnnnnnnnnnnnnnnnnnnnnnnnnnnnnnnnnnnnnnnnnnnnnnaaatattgacttaaatccaactcctatttcaattccttcttctctgccttcctctttccccctcttaaacccgcggtcaaagtaagaatttggcagctttaatacttgctctgcttcatccggatccagcatcttaatgttttccatcacttccgcctcctctttttcgttcagttttaaataataatcaaagaaaccgtgtaacagcctcatttttgcagggtcgagttccatgcgtgccagcatccgcagaaactccagtttgacctgcacccgttctttttctgtataccccattttgcttaataatgccgcggcaacagggttgttgctccggatataatttctccaattttgtttcatcagatgaatggataaatagtgaaaacgaagaatttcaatgttgtggaacgcaaaggtgtatgtatcaggggtttctgttttctcctcataactgaaaacggcaatcggcaataccggtttctggtgccggagactgatcatcatataataacgaaacatgcgttcaggaaagggtttctcgtaatatgactgcggctctacatggatgagaatcacggtgtctttcccttttaccttcgtttcggcaaggatatcaacccgtttttgttcaccgcccggaaagtccgtaaactgttcctgcgacaaaaacctcacccggcggtagtcgagatccgctgacacatccgggaaaaacgcctccataaactcctgaaaaaagttttggatcagctccttaaacaaacgatcatgtacattgtaaccggttttcttttccattaccagttccaatggcaacacctcttttcttatttttcagttttattataaaggacaaacgttcgtttttcaagttccatgatttatacagaaactgttcaaaacctgaatatatggcactatgaacgaaatgtcgcaggtggcgcaatgaatgagatttgtagtgcaaaatcggtgaaaaattcaatcgattgttgcattattttttcacattcagagaaaaagaaaaacgactgcaaatgcagtcgtatcaagggttttaaaaaattttaagctagttgttcagtttttagaaaacgccctcggcaggaatcgaacccacattttgagaaccggaatctcacgtgctatcctttgcaccacgagggcaataagtgattcaacaataatagattataaaggacaatgaacaaaaaagcaagcccctttttggttgagctttttgcgatgttagtaacatcgcaattacctctggttttattttatcggaatttggttatgatgggtattatagttcaggtgaaggcaattcttttgaccttcattgaccaatattgtatgatcagtacataaggatggagaataattcctttaacatccatgattagcatatgatggaccattccgaagagaagaaggaggatactcaatatgaatttaattcccacagtaattgaacaaacaaaccgcggggaacgcgcatacgacatttattcccgcctgttaaaagaccggattattatgcttggcagcgcgattgacgacaatgtttccaactcgattgtttcccagcttttgttcctggaagcggaaaaccctgaaaaagatatttatctttatattaacagtcctggcgggagtgtcactgcgggccttgccatttatgacaccatgcagatcatcaaaccggacgtgcaaacgatttgcgtcgggatggctgcatcaatgggctccgtgctgttgaccgccggcacgaaagggaaacgttatgccctgccgaacagcgaagtgatgattcaccaaccattaggcggcgcccaaggccaggcaacagaaattgaaatcgcggcaaaacatattttgtacacgcgcgcgaaattaaacaaaattttgtccgaccataccggccagccgattgaagtgatcgaaagggatacagaccgcgataacttcatgagcgcggaaaaagcaaaagaatatggtttgattgaccatattatgacaaaaaaagaattgaaataagattgaacaaggccgtccgcaaacgggcggccttgtgctgtgtttgaaaaacccgcaggctgacggccgcatgcgcttacatcaggacggaagtttttctttcccttcaatatagtttgccaagtgttcaaaagcttcttcttcatcgctcccgtccacgctcagcgtaacagtttccccgtggcccgcagcaagggtcatcagccccataatgctttttgcatttacctttcttccttctttttcaagaaaaatttccgatgaaaagcgggtggcttcctggacaaattgggctgcagggcgcgcctgcaaaccggattttaatttcacttccaattgtttttcgatcacgataaccctctcctttcaagtagcaggacgggggcgccttctgccaatacgccccccgtctttatactttttaaacctatccatcttacatgattaatttttggcacccattatgaatttttattggcaggcccgtttgcccgcagtttttcggcaatttcatcgattttgcggagccggtgattgatgccggatttgctgatatgcccgccggacaccatttcgccgagttccttcaacgtcacatcctgatggttcacgcgcaatactgcaatctcgcgcaatttctccggcagtacgtcaaggccgaccgtttcttcaatatagcggatattttccacttggcggagggccgccccgatcgtcttattcaaattggccgtttcgcaattgacgagccggttgacggaattgcgcatatcccggacaatccggacatcttcaaaccggagcagggcatgatgggcgccgataatattgagaaattccgtaatcttttccgcttcttttaaatacgtaatatatcctttttttctttcaagcgttttgctgtttaaatgaaacccgttcatcaggcggcatagtgcatcgttgtgttctttgtattgggaggaaatttccaaatgataagaggaagtttccggattgttaacggatccgcccgccagaaaagccccgcgcaaataggagcgtttgcagcacttcttcttcagcagttccggggaaatattccgggtaaaggtaaaatgttcaccgagaatatgcaaatcttccaatacttcttttgcccgggccttcagcctgacaatgtagacattgttttttttcaggcgcatttttttcctgactaataattccaccgggacatcatataatctttttacaaggacgtaaatccgccgggcaatggcggcattttccgtctgcacattgacaaccagcaccttgttggaaaaagataaagatccgttcatccggatcagtgccgataattcggatctcacgcagcaatcttttactgctaaattggtcagctctttcttgatctctgatgcaaatgacatcctccaggcccctcccttggcaaaatttagagctatgcgaaaaaatgcacatgaaaaggggatgttccacctttatcctttcaccgggcactggagcgtgaaagccattgctgctttttcaaaatatcataaaggatttcggcaactttttccgtatcgtggcggatgaccccgcctttatacgttaaaatatttcccgaaaccacctccaggccgagccccattaaacgcttcacgtcgtatacaacaggctgtgccagctcctcgcggtaccggctcataaccggttccggcacatcttcatcattgacgaggatcgtatcaatgcaggcactgcccatatggttgaaaatcgtctgcacgtgatccgcggcagtataatcattcgtctcgcccgcctgtgtcatcaaattgcatacatacacttttttcgcatgtgcctggcataccgcttctccaagacccggcaccattaaattcggcaaaatgcttgtataaaggctgcccgggccgatcacgatcaggtcagcttcctgaatggccgttaatgtttccggaagcggctgaatgacttcaggcgtcaaaaacacccttttgatttttttgccggacttcggaattttggattccccggcaatgatcgatccgtcttccatttccgcgtgcagcacgacactttggttggcggacggtaaaacctgcccccggacattcaggactttgctcagttcctttacggcgtgtacaaaatctccagttatcgaagtgagcgccgcaatgatcagattgccaagcgaatgcccggaaagttcatcgccggtttcaaaacggtgctggaacattttttcaagcagcggctccacatcggatagagctgcgagcacattgcggatgtcccctggggaaggcatatccatttcatgacggattcttccggaactcccgccgtcatctgcaacagttacaatggcactgatctcaaccgggtattttttcagcccccgcaaaagcaccgggagccctgtcccgcctccgatcagcacaattttcggatgcctcatggcttacgctcctcctttcttttgatatcacggtgggaaatcgttgtatgatagtctttttcaaaaaaatggccgatatactcggcaagcgcgacagaacggtgttggccgcccgtgcacccgatgccgatcaccagctggcttttcccttcccgtttgtaatgcgggagcataaaagcaagcaaatcggtcagcttttcaagaaatttttgcgtttcattccattttaaaacgtaagtgtatacctcttcgtccagtccggttttcgggcgcatatgctcaatgtagaacggattcggcaaaaaccggacatcaaaaacaaggtcgcagtcaatcggaatgccgtttttaaagccgaacgacaggacattgaccgtgaaaaccgactgcttattcgccgaaaactccaacacgattttttcgcggagttcgcgcggttttaaattggatgtgttgagaataagctgcgcgcgccctttcagctcctcgaggatttttctttcctgctgtatcccttcgagcggcgtcccatccggcgaaagcgggtgggaccggcgcgtttctttatacctgcgcacgagcacagaatcatccgcatccaaaaataaaatggtgggcgtaacccacgaagacttgtcaagttcatccagtgcccggaacaagtcatcaaagaattcgcggccgcgcaaatccattacaagcgcgactttattcattttattactggcatctttcatcagttccagaaattttggcaaaagcgtcggcggcaaattatcgacacagaaaaacccgagatcctccaggctttggatcgcaaccgtttttccggccccgctcatgccggtaatgatgacaaactgcatttgatttccttctaaacccattctttttccccctgacggaaaatttagcatggcgtttcagcttggatcgagcctgtatgaaagcaattcaaagtcgggcgtgtacgtaaactggccgtagatgatgccgcttccgtggaccatatattccaaaatatgggtatctcccgccgccatcggcaagtttttaatttcatcaatagcatgccactgcaaaattccttcagcagattgctcgaagtttttgccgtcgccgtctgttgcgacaaacgtaaacatcatccattcagacacgggtttatccctgtctttgatgacaatcgtgaaaacgccttttaaatcagggtgttttaaataaatgccagtttcttcgcggtattcgcgaatcacggcttcacggaccgattctccctgttccattttcccgccaggtgcaacccaccagttgcgccgcggcttttgcagcaataaaacctgtccgtccttgatgaatacacaatttgttattctttgcaaaggagtcacctcatatctgaaccggaatgatgcggacaaatccgcatctattcaaccgatggataaacctttcccgtgcgtaaaaaccatgtacttttttattatactattaatgaaatggttgaacaatgaatgcacccgccccgtatatgtcaagttttccccaatcgagaaaatcgcgcgggtgaaaggccgtggctcccgaactttgttttgtctttcaccgggcaaatgaaggacaaatagccggcagccacgctttgttctgtctttcattatgccgatgaaggacaaatgggcgcacgccacccctttaattgtctttcatctcccgtatcaaagaaccagcgcattatcaatcggaaaaagcagcgcaatatcctgcaccggctgcaagttttgcacaaaaaaagggcacagggttttcctgtgcctgggagatagggtctttgaaccgcttatagccggagccataagtgttcttggttcaaacatataaaaaagggggtcaatttatatttatatcataccgcaagtttatttcatacgggttacaaacacgttaaaaccacttgacgtttcaaacttccctgtttcgacaaaatgccgggggatgcacgcctttttatccagcactcaaccggctttcatagcttctttcaattcttccacataatgctgggcgttttgtgcggcaatgctgccgtctcctgttgccgtgacaatttggcggagcgttttttcgcggacatcaccggctgcaaaaatgcccggaatttttgtttccatttcctcattcgtcacaatataaccggcttcattggtaatgcccaggttttcaaaaggcttggtcaaaggcaccatgccaatataaatgaaaacgccgtccgttttaaatggtttttccgatccgtccacagtcgaaacgagcgtgacagagccgacttttccgttttcttcgtggatttctttcaccgtatgattccagataaagtcaattttttcatttttaaaagcccggtcctgcaggattttttgcgcccgcagctgatcacgccggtgtacaattgtcactttattggcaaagcgcgtcaggtaatttccttcttcgacagccgagtcgccgccgccaaccacaacgaggtcttttcctttgaagaaagcgccgtcgcacaccgcacaataagaaacgccgcggccgcccagttcgttttcgcctttgacaccgagtttcttatattgggcgcccgttgcgataatcacagcaagcgctttgtatgcttttgtgcccgctttgacaattttataatccccgtctgtgtcaatgcctttaatatcgccgtatgcatattcggcaccaaactttttggcatgttcaaacattttatttgacagctccgggccgagaatcgattcataacccggataattttccacttcttccgtgttgaccatctggccgcccggaacgccgcgctcgatcatcaaggttttcaagtttgaccgcgatgcgtaaacggcagctgtcatcccggcaggccccgccccgataatgatcacatcataaatttgttcttcactcatcgtttgtaccactccttattgaagggccgcggccgggaaaccgcaggccgcctgttttcatcgttccacaaagatgcaattccatacgattttttcgaaaaaaccccactttcttttatgcagtggggttttctttcattctctatagtaaaggaatattggtttatcgtccattcttgtgcttaaaggagcgatttgatccggtttgcgtatttccttaacgtggagacggaaatccggtactcctttgcaatcgcctgctgggacactttgtcgcctttttggcggtgccacaagtaatcgaaagcggcggcaaatccggcctcattttgaaaccgttccccgcgtttcaggccggttaaaaagatcgaaaaccaggcgatcattaagttggtgtagcccggaaacatcggcccgtaatggctgtggagaatacatgcaatattgtggccgtgcacaaacacctcatccgggtcaaaccgctcgcgaatatccgattccagcacatgggcgaggtaaattttttcggcaagcgtaaaatcatcaagcggcttaaaatccggatgcgagacaatatccgaacggttgctggacaacccgatcatgaaaatcccgaaaaaccgctcgggcaactccgcactgttcagcctgtccaaaacaaattggacatttttctcgttcattttcttttccatttcccggttccatggttcgcagccttttttctccggattcagttccacgagctgttcccaggcggcttctgctgcctgttgccggcccgtatggtaagccgcctgcgaaagccagtagtaaaacgaagcatccccgtcaaatccagcttttctcaaccggttcagccaaaggtacgcctcttcatagcgtccgacaatcgcaaatgtggcgccaagtttatattgatggtccagtaacactggccggactttttcaaggccgcgtacaatctgttccagcttttcgtcatcgtgtttatggtagtaaaagaccgctaaattgcaaagcgcatgaagattgccggggttcttttcgagcaaatccatcagcaccgcaaccgctttttccgtctggccaaggtaaaaatacgcaagtgccatgttgttgtaggcggaccaaaaatcaggatatttcttgatcaatttgttcagctccgaaagcgccatttcgaaatgtcccgcttcgagatactgcctggcttcctcctgccttgccatgagttcgtcctgttcatacgaaaaagaacccgtttcatcctctttttcggcgttcagtatataaatgagttcttccgcttcctccctgtactcgccaaacgggtccagttcaagatatttccgtgcattgtataaagcttcatcaaaaagcccgaggtccgcataattattggcaataaaataatggcattcgaccatgccgggatcaagttttgccaggatatggcgaaaaatgtcaattgcctttcgatattcttcgcaataggtataaatgatcgcaagctggcaggcgatgaccggatcgtacgggtcaagctgggcagcgcgctgcatatatttcaatgcttttttgatatcccggcggtcataagcctggacacctttattaaaatagtattctcccgtcggtataaaagacagcacattgccatgctcctgccttaatttggaatctttgctcatgttgttccctcacaaacaagtaacattcattatttcttgtagtataacatacaatcgggaagcctttaaccttttgggatgaagtaattcttcccttttttacagttttgtttgtcccggaccgttcttttcgctgcttttatgcctgatttgaagcgggttcccgcaggcaaaggaaccggacggcacatctttatggacgacagaaccggcggccaccaccgccccgtctccgatcgttacgccgggaaggatggtcgtgttcgcgccaatcatcacatcatcgccaattaccacttcaccaatccggtattcatcaatcaaatattcatgcgcgagaatggtcgtatgatagccgatcacgcagtttttgccgactgtgatcatctccgggaacagaatatcgacaagcgctttgtaggcaaaagccgtcttgtccccgacttccatgtacaaaaaggtgcggtacatttgatttttgaggcgcaaaaacggaagaaaacgcgcgatttcaatgacaagcacatttttaaacactttccagaacgaaacggttttataaatttgccaaagggcattcgatcctttaaccggataccgctttgtatttctcattttacatggaccccgacaatttcagcaagatccggcatcgtttcgagcataaaatccgggttgtattgctcaagaaaagcgcgcccttttgccgaccatgcgacaccggccgacaaggtgccggcatttttccccgcttcgatatcatggtaattatctccgatcatgatcgcttcttccggcttcgaaccgagaaggcggagcgctttttggacaggctccggatccggtttggcctttttgacatcatcaagcgccaccaccacgtcaaaaaacggttccaattttgcaagtttcatccctttcatgatggtgcccttcatttttgttgaaacaatcccgagtttaaagcggtgttccttaagcattttaatcgtgtcatatacgcccggaaattccttgacaagcgcatcatgctgctgaatattatacgcccggtatttggcagtcatttcctccgcccgttccggatcgatcgacgcaaacgtgtcgattaaaggcgggccgttaaaaatgagcacatccccgcggctataacggcccggatagtacgcattgagcgtatataaaaaggattggataatcaattcgtttgtgtcaattaaagtaccgtcaaagtcaaacagcaatgtcgtaatccggtttttcaatctgcttccctctttcttttcaaggctcataaaacgtttggctgtcaagcccgtttttctgccagcaacgggctgaactatccggaaaaatcaatcctcttcactgctcgtcatatcgtttggccgataagcctgtttttctacggtaaaaccagagaatgagcgcgcaaacaatcagtatgaaagatacaacctgcgccatgcggatatgcgcggtcaacatcaggctgtccgtccgcaagccttcgataaagaaccggccgatcgagtaccagataagataggtcaggaaaatctcgcccctgtgcatcgccgcccgccttctcaacaaaagcaaaaaaacgaaacctgcaagatcccaaagtgattcgtataaaaatgttggctggtaataagtgccgtttatgtacatttgattgatgatccagtccgggagatgcaagttttcgagaaaagccctggacacagcccggccgtgcgcctcctgattcataaaattgccccagcgcccgatcgcctgccctaaaatcaggcttggcgcaacgatatctgcaattttccagaaagaaacaccctttgcacgtgtaaaaagaatcgcggtggcgaccgccccgatcagcgcgccgtgaatggcaatgccgccattccagattttaatgatttcacttgtatgttgtgcataatatttccattcaaacaggacatagtaaatacgggcgcaaataattgaaaccggaatcgcccatatgcataaatcggcaatgatattttggtcaaccgaaagccggtcagcttcccgcatcgcgagggcaaggcccaaaagaatgccgcagccgataatgattccgtaccagtgcacactaaacccgcctaaatgaaatgcaatcggatcgagcggggttatattcgaatccattttccacaaccactcctttttttccgcgccgtaaaggccagcctaaaatacagccggccatttttacggttcgttcttttcttcttccgttccctgttcgtgttcttcaatgacgtttgcgagcttggccgtgaattgccgcgccgcattgacgcccatatttttcaggcggtaattcatcgccgccacttcgatgatgatggcgaggttccgccccggccgtaccggtaccgtcatctttgtaatttcggtatcaaggattttgactttttcctcatccaacccgagccggtcatattgcttatgctcgtcccataactcaagattggcgatcatggtaatttttttatggctgcggaccgcgccagcgccaaacaacgtcatgacattgataatgccaaggccgcggatttcaagcaagtgctcgatcaattccggcgcatgcccgatcagagacccttcttcttcctggacaatctccacgcagtcatccgcgacaaggcggtgcccccttttgacaagttcaagcgctgtttcgcttttgccgacaccgcttttgccggtaatcagaacgccgaccccgtacacatccacaagcacaccgtggatggctgttgccggggcgagcttaaattccaaataattggttaagcggcttgaaaaccgggttgttttcatcggcgtccgcatcacagggaccgacttttcttcggaagcttcttttaattcatccggcacttccaaattacgtgatatcacgatgcccggtgtaatatcgctgcataagttgtccatcctgcttttccgttcttccggcgagagcctgttgctgaatgtgatttccgtcatcccgagcagctggatccggtcggccgggtaataatcgaaaaatcccgtcatctcgagccccggccgtgaaatatcgcttgtggtaatggggcggtggatgccctcttccccactgatcaattccagattaaaatgttcaataatatctgctacgcgcacctttgccactgtaattcctcctgttaattccggatgaaaaccaccggaacggcttgttgatgattcaaaggcttcttattattttatcatttcccaaagggcccgttccacccttttcaaccaaaaatcatcccatgccgtataaactgcgttaaagcggttcagggcctgcatggcaaatcagagcggatgctgcttttctcctcttccaaaagggcggacgctataaatgaacgaaaaatcgccaccctgttgtaaaaagatggatgcttcatgcttaagtcctttgaaataaatgccgggcggtgcgttttcattgtaaaacagtttggctgcctgaaaatgatttagcctatcgggccatggcatgaaaaaacggcgggtattcgccgccgctttttcaaagcctctgtccggtccgccgcctgtcttatttacggaatacggttttctgtaaaatcaagtttacgaccgccatgatgaccgctacgataaaagccatgccgaagctgtcaatttcaaaacttgcgcccatcagttcatccgtcagcacaagcgtaatcgcgttgatgacgagcaaaaagatgcccagggtgagaatcgtgatcggcaatgtaagcaaaatcaggatcggccgcaccaaaatattcaaaatggacaagacgaggcttgacataacggcagccccgatattttcgacataaaagccatgaaaatagccggaaagggcaataaataatacagcattgatcaagattccaagtaaccagcgcatgatcatcaaaccttttctgtatggttctttttacagtatataacgacacagctgctgatgccagtagcagagcaggcacgcatctttttttcgcggaatttctgctccccggcaaaaatgcgattatgcttccgggctttcttcttcctccaacttttgttcgttgatcgtaatggaccctgttttggcatcggcaaaaatgtataatgcgggctcggtggtcccttttctgctgaaccgcgccactttctgaatcatttcttttcgttcttcatatttctccatgccttgaaggtcgatcgcaaagttgccgaagttggtttttccttccccatgtacggagatgttttccgggatggtcatttcaatgtttccggagacggtcttgctgtgcaatgaatcggcgcccggagccatttttaccgtaatattgccgttaaaggcttcaaagtctgaccgcctgcaagcaccgttccaccggatatccccgttcatcgtctgtgcttcaacctgcccgattgtatttccgtcaaaatcaatggtgccgtttcccgtttcgacttccgccgtttccaaatcggcatgttccacaagtacttttccgtggagtgttttcacttttaactggtctgcctgaatgtctttcacctggacgtttccattgaaagtgctcaacgtgattttccggtagcgggacgccggaacgtaaacggcagtatccactttcatccatttggattgcgtagaaaacacaagcctgccgccctccaccgaaaacgtgctattgttgagcagaaaactgcgggcatcttccctgtcattggtacggtacacttttgcctgacattccactcgcacatcttcctgatcccattgtttaaacgttaaatgcccgtttgcgatatccaattcaatcatatcggtttccggcaggctttgctggaagacatgggagacttcggcagactggcccagctgaagatcaaagtcctttatttttttcagcgcgccgccgacaagatcaaacagtttttctttcgtttcattaatattccggtctgcatcccggaactttttctgcccggttgtgctcccagcctctccgctgccgccgtttgcatcctgtttcccgctttctgccggatcctctttcggcgccatttcgcccgcctcttcccggtccaaagcctccaacagcgttagcgcctcatccgtcgacaacttcccgtccttcaccatatccaaaatccgttttcgtttgttttccatggggggcctccttttttatacctacaacactcttacgaaaaacaggaaagcaaagtttctgttttgacctaatatctatagcatatttgaatgcaaataaaaattcaaatgcatactgaaaaacgtaaaaaataagttaaaacatccgatttttaataattctgttgaaatctacaataattttcgtattcaaatttgttactctcagatatctggctgaacgactcagataaagttaaataaaagcccaaatctggtcatcaaaatataaaatatttgttaaaaaattcagttaaataatctcaagttaccggtttttatctttgctcaaaattttatccagcatgtcttttgtagcaggctcaatatacaaagaaagcgccttttcgaggcacttttttattcattttatcttaagggcaatattagagttaacagttgtatagaaagtgtaatttcgcccttcataagtgattttattttcgttgattcttcttatatttgttttttcgtatccattgtatcgcaaatatattgtaaaactcgaagtcggaaggggttttaattcctccatattcaccactaaatgggcagttccattttcatcaatatctacaggataagctttttggtacagtgcattctgtttatcaacaaacaaaacatctttcactttgtctacatagtccccataaacactaaatattaaatggtagcaatccccttcaaaataatctttttgaaaaacagcaagcattgaaactctgatgaatttatatttttcatctttcaaaggggaaacaacataaggaagctggtttttaattaatacatcctttaccttctcccccttttcccatttgaacaatttttcaatatcgtcatatcgaccttctttaaaaagttcatacgcggctttgttaattggtttgaaaaagttttccgaaaaatcgtatcttaatttttgggttgtttttagtacttcctcaaaaatattgaaataagtacttttgtttttgctctttaaaaaatgttgcctgttaaagagccgagtaatggagtcaaattcgtataatcgatttaatatcattttttctttctctacatctaaacgtttcttgataacataattgattaccgcaatattgctctccattttctctgtaatatccgttttctttgttaaagaaccattattttcatccaacctatttagataataaattggcacagttgttgtggagattgctttacaattaataagaacatctataaaaaattgtttatcctctgcaaatcgcatttcagggaatcttattttattttcctttaataactttgttctcatcattctggctctcggtcctaaatgttgaaaaatatgtgggattgaaaatggagaaacacttcttctttcctcacacgactcatgttcccctacaattttattccccttcgaattcacttctatcgttttgcctacaatatagtcgtcccctgttttctctaaaatatcatacatttcttttatgccatttggatcgagccagtcatcagcatccaaaaacgttatataatctgcatttgacaattttattcccaaatttctaggctgagcaggtgtccctgtatttttcttcaaaaaaacaactacaatgtttgaatatttttcactgaattccaataagattttcctagaattatcgttcgaacaatcatccactagaatatactcaatattttcaaagccaatcgtttgattaatcactgacttgattgtcttttctaaatttttctccgcattataaaccggcgtcactactgttaccttaggataaacatttgttttcaaaaaatattttttatttttaacaaagtaaccttccaaattatacttaatattattttgcctctcgaaagccttcctcttttccaacagttgtttttcgtccacaataatcccagccttttttagatattcctcttataaaaggttaacttaaagaaagtcaacaaaccgatttctaaattttacatgtaagatacaacctataataaaaataaaaatggtcattccccaataatataatgtatagtgccaatgatcaataaaataccatcctccatttccgagtaatgagtatcgataaccttcaatgacataataaaacggattaagctttaaaactgcttgtattttgggagaaagtgtattaggattccataaaattggtgtaagataaatcatcattctcataagagcttgaactatattttgtacatcccgaacaatagtcgataaagttgaagtaacaagggacaatccaaatacaaaaatatagacgctaataaagtaatagggtataccaatataataaatagaaaccggatatccctttaaatttaaggccacaataacaatcgctaaaagcatgaaatgttgataagacttagacaaaatcacataactgggaatggcacttagtggaaaattcatcttcgctaccattttaattcttgtataaacagatctagaaccctgcaagacagaagggtaaataaaaaaccatacagatatacccgaaagcatccatggaataaattgagggcgaggatgccctcctctaataccaaaaccgaatacaaaccaatatatagatatttgaatcatcgggttaatgatttcccacaaaactcccaggtaattacttttattttggcttctcatttcataagccgacaatctaaggattagataaaaactatttatttgttcccttatgacaataatagctgatttcatatttctttccttcctagaaaaacgcggtttacgactttttcagatgatcttccggattccaaataacagaattgtttataaaaaacactaaaagactccggaagtttatagccattcgcatcaagctttttaatttcattaatgatttcatcagttgtttttactagcggccctggtgcgctcttttcaaagtcaaaatagaaaccacgtaatttgtcacggtactcatcaatatcataaacaaaaaagatcattggccgctttaggattgcatagtcaaagaacacggatgaataatctgtaattaataaatcggctaagaggtacaattcccggatatcctcatgattagagaaatcataagcaaacccagtataaagctttagatccagtttgctggcaacaagatagtgcatccgcatcacaatgatatattgatcacctaatttctccttaagtttttccaaatctaatgccaagtcaaacttatacttgcctttcccataatacttattgtctctccatgtcggagcatataaaataatttttttatcttccgggagcccgtatttgagtttcaaagcccgtatttcttcagggtgattttttttgaaaagaaaatcgttacgaggataccccgtctcaagtatttccttgtcaaagcggaaagctcgtctgaaaatttcagtagaataagcatttggagaaataaggtagtcccaatggctcgcttctttaaggaaattacgtttatatttctcagttgttgtgccgggcatatgaacttcttccatatcagcagccagtttttttaacggcgtcccatgccaggtttgaagatagactgtatgagccggcttcggtatccaaagcggcattctgctgttcacaacccagtatcttgccctcgccatagcaaacagccatctgattgaaagacgttttacaacaattaaatccctattctcaaaattaaaagaaaacctcctatcaacactccaatataatttataccccgggtacttttctttcatgtattcgtaaatagcacgagggttatcactatactgttttccaagaaagctttcgaacataacgagctttttatttgccggaaacattccaacaaatttaaatgcaaactgatatgctcgtttcgtatatctgcttcttttaattttccgtatccttctcttcacaattaatttcaggtgagtagaatagcggtaatcatctacagaaattgataaaaacttctttttcttggttctggtcacaagcagttttttcttttgaccattatattttttaatgtatttttgtcctttactaaatgggctgtccggaataaattttaaacgtgccgattcttttacctctccgtctacatttatttttaaatacgatttatatcggacttttccttcccctaagagagcgatatcttgagactttatttcgacataaaagcctgcatgactaaaatctaatccatgatggccataatctttggttaaatcctcacgattaataaattgagccgggtatttaatttcaatttcctgctttttattccttaaaataaattctctctcttctaaccgatcttttcctgttggatctacaacaaagccactcaaagaaattagccctgtcttatcaatggacactctttcaactttcgcaattactcttggatcctttatccgaaatgaaacatttcctttgtttgttgaaaaaggtaaaaaaattttattttcttgccgattcacataatataataactcaatatgctgagtattactccttaatcgaaacctgaaaggctctcctgtttcttcatcttcttcagtgtccagttctgttattttctcttttgttaaatatacatcccaaatatcgtcaaaaagcacgaagtgatcaagctcttttttttctatctttgaacaaactacacaaacttccccgctttttgatagttcttgtatgctatatgtttttttcaaccctctataacggctaacaagggtaagttgcagcggagactggtcttcagcaatatacaatggaacatatatttcgagcaaataatcatcatgctgaaattttagttctttcaaagtacatctttttgtttccaccatatgtattttaactcctcccggaagcagaattcctactatgctaatacaaatatgtaattaaattataactggaattcccagtagattattgattctaaagacttgaaaaatcagtaatcctgttcatgtcgaaattatcttctttaatgtactgcaatctcttcagtgtaaaaagctgcaggtcgaagttctaattgctcatattcttcccaaaagctctcgaagccttcataaaattatacttcattttttcagaccccaccactacccggtcaaaatgggcatacacttttttaaaccgcttcaatgcacgcttgcccctcgtgcggatcgttttgtcttcaaggccgaacgttttaacggcccctgctgcatgccagagctggatgcattccaccccttttttaaaccgggcggcagccaggaaaccataatagttatcaacaatcacaaatttcgatgtcgcaatgttgtataggctgcggataaaatgctgcaaatttttcatttcaaacagaaataccttctcttgccggacggtttccgcaacacggcgatagcaggaagaagtacaaacgaacactgtctgaaaagaaacgggatgctttttcaattcctcatacacatataaactgttctgctcaaatgagacgacaaatgtgattttcctttttaaaggaaaaattttacataatgtaaaaagtacgcgaaaaagcagtaagtataaggaaatgaacagttccctaaccatttttcacagaaaagaggtccttcttaatttttgacgtagagatgccgaccgtccgcggcaggtaaaccacttcgcaataatccttcaggaaatcaaatttgcccttccagtcatcgcccatgacgaaaacatcgacattgtattttttgatatcgtctattttttgttcccaagaatgttccggaatgacctggtcaacgtaacggatcgcttccagaattaatttccggttttcatagctgtggtacgattttttatttttgatttcgttaaattcatccgatgaaaggccgacgattaaatagtcgcctaatgctcttgcgcgtttcagtaaattgatatgcccccaatggagaaggtcaaatgttccgtatgtgattacttttttcatacagttctctccctgctaaatgtaataggcaacattcctgcacaatgcgacacttttcattatttttccctaatctttactcattatatgtctatttcaagcagaattcaaatacttcttgaatgaggtatttgtcaagttttctcgataaggtttaaatttcgggtatcacgagacactctctttgtcactttcaattnnnnnnnnnnnnnnnnnnnnnnnnnnnnnnnnnnnnnnnnnnnnnnnnnnnnnnnnnnnnnnnnnnnnnnnnnnnnnnnnnnnnnnnnnnnnnnnnnnnntgcttttcaaaatatttcacattgggaactatgtttgctgccaagtaaaagccgccgtccaaagccccataattaagcagggttggattaggcgtttgattgatcactttcgcaaaggtctgctgggccggcgggaaacgaacaaagaacttggattctttaatatttgaattatatccaaaacacaggaccagagacaaaaaagcagtcgcaaatactacatcccaattgacatgattcaaaatatcaaaatctgacttttcataggcggattgtaaataataaccgattgatatcagcccaaacatgattaccggaacgatgattaaataataataaggatagctccttccgccaatatacacccctaaaataagaaatgaaatcatgcttaccagcaaatatttttgcattttgttaacaaaaaatttgcgggtaagcaaaaagtcaataattccaatcatcataataagtttcatttcccaatttcggttaaaaaactccccaaataatactgcacagttaattagctttccaataaaagacaattgagacgaatacataaaaaggttgaattttaaataaacattgattaaatctgagattgcgtgatgtaacccaaaatagcaaagccacgggacacaagacaggaatagccctgtgattgtgaataatacagcccgtacttcatccttccatttcttttgcacggtaaaaataatgaacaaagcaaaataaaagccaatccaggctcctatcaaggtaaactttatccaaaaaacacaccctgccatgaaaccgttgattaaataaaccaaccatgaaaacgtaaaatccgattcttttttcaaatgatttagcacaagatagaaaaagataattaaaaatggggttgcaaactcttctgcgctatccccaaaacgaaaagagttagagttgaggaaaaaaatcggaaaaattactgcaaccagcatagatggaagccgttttaaatatagatttgaaattttttggataaatatcaaattgataaacattgcggcgctttccaaacaatatacacctaaaaaagttttgtgtgaaatggtgtaagctatagcatgcagagcgtataataaagggcctttttgttcaaaaagatcacgatacggcaccagcccgtttgccatccctttcccgaccgtaaaaaatgcgttggcatctacccattcattgatcgcaaaaagaggggaagactcagtaaaaaacaacataagcacaaaagcatataaaaataaaaaaactgctatataaagtgagaatttttctcttttaaacgcaatctcccttttcataaagtacgagccccttcatgcaacatggtaattatttttttataaacatgcacttacgagtaacaaatgtaagttcccttttcaagggggaataaaggcatcagtctgttgacccggcaacgattataacatcccgaatgatgcaccttgatagattcctattcctataccgcccagaaagctttcaaacataatcatgtttttttggcagcaatttcttgattaccagcataaccaaaaagcaaacaaacagcgctacgtatttcaaagtctctatcatgcataaaatttccacagaaacatggctaattaagcgctgtatttttagcatggacgccatcatatatttttaaatcattcattagaaatccataccgcaacgaacgcggcaccagcggaggaataaaaatggacaagcgcaaattaaaaaaataaattcaatgatggaccggatatgaagttcctacttacctttctttatacgtatttttttcaatcgtatatcttggacgtctttttgtttccttgaatattttcccaatatattccccaataatcccgatcgcaagcagttggacacctccaacaagccagacagatagcataagagaagtccatccgctaatggtataagaaaaaatctttgcgcataatgtataaattgcaatcactatcccaacaaatacaagaacaaatccgagaaacgtgacaaaacgcacaggtgcgatactgaaggatgtaatcccgtcaaatgcgaatgccagcatcttttttaatggatattttgactctcctgcaaatctttctttacgatcatagtaaacctttgccgacttaaaccctaaaagtggtatgatacctctgataaaaatattctcttcctgatacttaacaaactcatccaaagctctcttgctcagaagcctgtaatctgcatggttcggaaccaggtttacgcctaattttcccatcaacttgtaataaaaaagggctgtatttcttttgaaaaaagtgtcggtgtcccttttatcccttactccatatacaatttcatagccttcattaaacttgtctataaacatttcgatagcatccacatcgtcctgcaaatccgcatcgatggaaatgacacaatccgaaaaatctctcgctgtctctaatcctgctattaaggctccctggtggccgaaatttcggcttaactttaacccttgtacgtaagaatttatatccgtcaatttttcaataatctcccaagtgctatccttgcttccatcatcaacataaaaaatcatacttttactgcttattttgttttttacaactaatttatccaatactcttgttaattcttgtgttgttttctcaagtacaagctcttcgttataacaaggaaccacaattgttagcatcggcaaattattactcatactttacactcctattagtgaagacaaaatttccaactatataatatgaaagatacattgcctctctgttgcctattgagaaaaatagtaaacatgcaaaagccatattaaaaatatcaaagatacttttatctggaaattcctgccctctacgtaaaaaataaaaactcagccacatcccggcctgaattccagtttaaacagatatcccaaacaggtgagctccggccatattcgcccgcttctcatactcccgcaaactcacccatacattcttccctttttttcgtcctgttcatgcaaatactgtaccagatcgcggctggagtggccggcagagtatgtattccaggttcttgagaatgcttctatacttcccgtatcaaaagaaccagttttaatcaaatcaataatttctgccgtcgtacaggcaatcggcccggggacaagccggtcatacggttcccacaacccccgtgtagcctgatagctttccagatcatacggataaaagatcatcgggcggcctaacagggaaaactcaaaagggacagaagaataatccgtgatcaaataatctgtaaccagcaataattcgttgatgttcatatcatgggggcagtccaccacaaaatcaggatactgcagcagccctgcccctttgtttacagccggatgaaatttcaccgcaaaaatatactcatccttcagttcatcataaagccggccccaatcaagcggcacttcaaactggtccggatgcgggtccctgaaagtcggggcatacaagatcacttttttcttttgaaaggcaggatactgtttgtacagcttcttctttatgtcccggatcctgttttggtcaaaaaaaagatcggtccgtggtatgcctgtgcaaagaaaattttcaggaggaagcccgaaagccctcataaaaatatgcttcattttttcagaccccaccactacccggtcaaaatgggcatacacttttttaaaccgcttcaatgcacgcttgcccctcgtgcggatcgttttgtcttcaaggccgaacgttttaacggcccctgctgcatgccagagctggatgcattccaccccttttttaaaccgggcggcagccaggaaaccataatagttatcaacaatcacaaatttcgatgtcgcaatgttgtatatgctacggataaaatgctgcaaatttttcatttcaaacagaaataccttctcttgccggacggtttccgcaacacggcggtagcaggaagaagtacaaacgaacgctacctgaaaaggatcaggatgctttttcaattcctcatacacgtataaactgttctgctcaaatgaaacgacaaaagtgattttccttttcaaaggaaaaattttacacaatgtaaaaagcacgcgaaaaagcagtaagtataaggaaatgaacagttccctaaccatttttcacagagaagaggtccttcttaatttttgacgtagagatgccaaccgtccgtggcaggtaaaccacttcacaataatccttcagaaaatcaaatttgcctttccagtcatcgcccatcacgaaaacatcgacattgtattttttaatatcgtctattttttgttcccacgaatgttccggtatgacctggtcaacgtaacggatcgcttccaaaattaatttccggttttcatagctatggtacgattttttatttttgatttcgttaaattcatccgatgaaaggccgacgattaaatagtcgcctaatgctcttgcgcgtttcagtaaattgatatgcccccaatggagaaggtcaaatgttccgtatgtgattacttttttcatacagttctctccctgctaaatgtaataggcaacattcctgcacaatgcgacacttttcattatttttccctaatctttactcattatatgtctatttcaagcagaattcaaatacttcttcaagaagcgggcgccgggttttcccctatgtacgagggtccctcccacaagcggggaggaacgccatacagtgagcacgccggttttccacgtaatagaaaaaatggccaaaagacaccgtacatcccgcattcagttattcatccggcagggcaggaggtagagaaacgcgggcgtccgggactttaggcgcgaacacagccagagtcgcacttatgaaaaaacaaaaagcatgcctcagcgcgccaggttttctatttctttttccattctttcccggtcgcgttccaacaccggcttcaaatattttccggtgtaggaggttggatgttccgcgactttttccggcgtgccagtggcaacaacagttccgccgccgtccccgccttccgggccgaggtcaatgatatagtcggcggttttgatgacatcgaggttatgctcgatcacaagcaccgtatcgccgttttccaccagccgctgcagcacatcgagaagtttggcaatatcatggacgtgaaggccggttgtcggttcatccaaaatatagaaagaacgcccggtcgaacgccgatgcagttcagatgcgagtttcacgcgctgcgcttcgccgccggacagagttgttgccggctgaccgagcttgacgtaaccaaggccgacatccgcaatggtctgcagtttccgcctgattttcggaatgttttcgaaaaaggagatcgcatcttccaccgtcatatcgagtacatcagcaatatttttgcctttgtattgaacttcgagcgtttcgcggttgtaccgtttgccgtggcacacttcacacggtacgtacacatccggcaaaaagtgcatttcaattttgataatcccgtcgccgtggcaggcttcacaccggccgcccttgacgttaaagctgaaccgcccttttttatagccgcggatttttgcttcgttcgtggaagcaaacacgtcgcggatatcatcgaacacgccggtataggtcgccgggttggaccgcggcgtcctgccgatcggggactggtcgatgtcaatgactttgtcgagatgttcaatacccttgatttctttgtaagcgcccggttttgcttttgcacgctgcaatttttgggcaagcgccttatgcaaaatttcattgacaagcgtgctctttccggagccggagacgccggttacggcaataaacaggccgagcgggaattttacattgatgttttttaaattattttctttcgcgcccctgatttcaacaaaacggccgtcccctttccgccgttcaggcgggagcgggataaatttctttccggataaatactggccggtgagtgaatccggatttttcatcacctcgcgcggcgtgccggcagcaacaacctttccgccatggacgcctgctcccgggccgatgtcaatcaagtagtctgcggcaagcatggtatcttcgtcgtgttcgaccacgatgagcgtgttgccgatatcggccatttgcctgagcgttgcaatcagacggtcattgtcgcgctgatggaggccgatcgacggttcatcaagaatgtataaaacgcctgtaagcctcgatccgatctgcgtcgcaagccggatgcgctgggcttcgccgccggagagcgtaccggcagaacggctcagcgtcaaataatcgaggccgacattgacgaggaaaccgagccgggattcgatttcgcgcaggatcagccgggcgatcgcctgctctttttccgtcaattcgagatgggcaaaaaaggagcgggcttccgcaatcgagtaatccgtcacttcactgatatgtttcccgcccactttcacagcaaggctttccggtttcaggcggtagcctttgcatttcgggcatggctgctgggccatatatctttccatctgctcgcgcgtaaagtcggaactggtttcgcggtaacggcgttcaatattgttcagtacgccttcgaattggatcatattgtcacgcacctggccgaaatcattttcataatggaaataaatccgttcgttgccagatccgtataaaataatctccatctgatgcttcggcaaatctttgacaggcgtgtccatgtcaatgccaaaatgctcgcacaccgcttttaagagctgcggataatattgtgagctgatcggttcccacggagcgatcgcgccttcattgagcgtaagcgaggcgtccggaatgacaaggcttggatccacttcaagctttgcacctagcccgtcacattccgggcaggcgccgaacgggctgttgaacgaaaacatgcgcggttccagtttatcgatggaaaagccgcagatcgggcaagcaagatgctcgctgaacagcagttcctcttccccgatcacatcaattaccacgcgcccgtccgccaatttcagcgcggtttcaagcgaatcagccaggcggggctcaattccgtcttttatgacaatgcggtcaacaacgatatcaatggaatgttttttgtttttgtccagctcaatttcttcgccgaggtcgagcatttccccgtcaatgcggacgcggacgaaaccctgtttcttaatatcatccagcagttttacatgccggccttttttccccgataccaccggggcaagcacctggagccgtgtccgttccgggtatgccatgatccggtccaccatttgttcgaccgtctgcgatgcaatttcaatgccgtggttcgggcagatcgggtggccgatgcgggcatacagaagccgcaaataatcataaatttccgtcaccgtcccgacggtggaacgcggattgcggctcgttgtcttctggtcgatggagattgccggggaaaggccttcaatcgcatccacatccggcttgtccatctgccctaaaaattgccgggcataagcggacagcgattcaacatagcgccgctgcccttccgcataaatcgtatcgaatgcgagcgaagatttcccggacccggacaaacccgtcagcacaacaagctggtcccgcggcaaggttacatcaatattttttaagttatggacgcgggccccttttacttcaattttatctaataccattgtggtcgtcacctgctttcagttctaaaagggcatcacggtaccgggcggcctgctcgaagtcaagcgcttttgccgcttctttcatcttttcttccagttctgcaatcatccgtatgcgctcttcttttgtcagcggctttttcgtttcttccgcttcatacggcgctgcatcttccgccgcataggtcgcgtggatcgtatcgcggatatctttctggatcgttttcggcgtgatgccatgttttttgttataggcttcctggacggcacggcgccgtttcgtttcgctgatcgctttttccatcgaatccgtgattctgtcggcgtacatgatcactttgccgtttgcattccgagcggcgcggccgatcgtctggatcagcgagcgttcggaacgcaggaagccttccttatcggcatcaagaatagcaacaagcgacacttccgggatgtccagcccttcccggagcaggttgatgccgacgatacaatcatatttgccgagacggaggtcgcggataatttcaatccgttcaagcgtttttacttcagagtggagatactggactttaatgcccacttctttcaagtagtccgtcaaatcttccgccattttttttgtcagtgtcgtgacaagcacgcgctcatttttctcaattctgtcctgaatttccccgagcaggtcgtcgatttgcccttcgatcggccgcacctcaatttccggatccaaaaggcctgtcgggcggataatttgttccaccattttcggcgtatgctcgagttcatacggccccggcgtagcggatacgcaaatcatttgcgaaatatgtttttcaaattcctcaaaccggagcggccggttgtcaagcgcggacggcagccggaacccgtggtcgacgagcacctgcttgcgcgcctggtccccattaaacattcccctgatttgcgggagcgtaacatgggattcgtcaatgacgagcagaaaatctttcgggaaatagtcgagaagcgtatacggcgtcgaaccgggcgggcgcagcgccaaatggcgggaatagttttcgatcccggaacaaaagcccatttcccgcatcatttccagatcatagcgcgtccgctgttcgagccgttgtgcttcgagcagtttgccgttatcgcggagctctttcagccgttcttcgagttccgcttcaatattccggatcgcaatctgcagtttctcattgcgcgtaacgaagtgggaagccgggaaaatcgcgacatggtcgcggtcaccgataatctcgccggtcagcgcgtcgacttcccggatccggtcaatttcgtcgccgaaaaattcgacacggatgcagtgttcatcgcgcgaagccgggaaaatttcgacgacatcgccgcgcacacggaacgtcccgcgttggaagtcaatatcattgcgggcatactggatatcgacaagccgccgcaacagctggttccgctcgatttccatcccggtccggagcgagacgacaagctcgcggtattcttccggcgaacctaagccgtaaatacaggagacgctcgcaataataatgacatcattgcgctcaaacagggcagacgttgccgagtgccgcagtttgtcaatttcatcgttaatgcttgcatctttttcaatatacgtatcggtttgcggcacgtacgcttccggctggtaataatcgtaataactgacgaaatactctactgcattgttcgggaaaaattccttaaactcgctgtacaattgccctgccagcgttttgttgtgggcaatgacaagcgtcggcttattcacttctttaatcacattcgaaaccgtaaacgtttttcccgttccggtcgccccgagcagtgtctgaatctttttgcctgcacggatgccgtccacaagctggcggatcgcttccggctggtccccctccggcttgtatttcgaaacaagttcaaaagcatgctgttccatccatgagcctccttaaaccggcatcatctatttcaaccttaaaaggccgttcttcgtctttcagtctttttattttaacataaatcctgccccgtctccaacaaaaagcgaacaagttttctatctttccataagaaagaacggtaaggattttccctaccgcttttaggaacggatggccgttatttcaccgggatttccagagcgtaccattcttcttcaagacgtgcattttgcccttcccatattttcttcgcatcctcaattcccttattatagtagtgtgccgcaagcttttcctgaaaaaagtcaaaataaacctgtgtggcaatcacaccgatttcttcacctgtctgttcccagacaaattgctgtatttcccgcagaatctgctgcttttccgcaggatccattttgaatccggtcatgggcgcctccgccttcattttttcattccttttttcatctttgccttccgtatcattgtattagcaaaataaaacccgattgtcaatgaagctgcatccacgatatataccggccacgtgcgcgtatagcctttataaacggaagcgacaatgagcgcaaccgtcagtatcagcccaatcacttggttaaacgtaacccgcgaaaaaaagatgacgagaaagcatggaaaaacagcggctaccaccaattgaacgatcatcctcaccccactccaagcccttacttctgctatccctattttttaacattccacccgaaaatacaagaaaaatcattgaaaatgaattatcttttgaattcattttcaatgatttcatttgtaatgccacgcaactggctccgttcgataaatcgttctgcgagcagatcaggcaaaatggacgttaaaaagtattggacagatgcaagccccgaaaaccgcaaaatggtccgcagcgattcctcgtaaatttccagaaacagcggctccggattgcccttttgaatttccccaaaagattcatacaaaagatcgactttgtcggaaacggataatatttttccttccagcgtatcgtccttgccttctttgaacaaatcaaaataaatctcccggtattcttccggaaatacgccgttgataaagtttttcgtcatttcttcctcgacctgtttgaacaactcatgcagctcttttgaagaatatttgaccggcgttttgatgtcgcctgtaaacagttccggataatcatgattcagcgccttttggtagagcgcgcgccagtccactttattgccggctttctcctccacatggccgaaaaactgggcgatttttgccactttaaaagaatgggctgccaccgagtgttcttggaatttaaacttgcccgggcagcggtaaattttttccaggtcagacaaacttttaaaatattggtgaacccccatcctgcttccctccttgctgtccgatttttttaggattgggaccggttctttgatatttccactattctagaaaaaaataaacccagcgtcaagtaactggatttaaaatctacatggtcaggaaaaatgcccctgtaatgacgagcagaatcccaaaccattttctcctgttcattttttccgacaaaaaaagggaagaaaggatcaaggtccaaatatatgtaatcgaggttaaaggatacacaatcgtatacggcatcatcttcagcaactgaatattcagcaatgctcctaatacatagaaaacaccgccaatacctagattcacaatgaaaaatccgctcagctttaatcctcatcagaggtgattttttatggaagggaatgatttacgcataagaaaatggaaaagaacagccgaacagtcatcctctcagctgaacttgaatgaaaaagcgtttgaacagtactttccttcacctgtcaagcgttggaaaggattagccgaaccgtcctgaaatatagtcttctgtctgcttcgatgcaggatttgtaaacattttggttgtttcagcgaattccaccaccctgccattcaaaaagaaagcggtatgtccggacacgcgcatcgcctgctgcatattatgggtgacgatgatgatggtgtattgcgctttcaactcgaggatcaattcctcaattttggctgccgataccggatcaagcgccgatgccggttcgtccattaaaataatgcccggttcaacagcaagcacccttgcgagcacaagcctttgctgctgcccgccggaaagccccgcggcagacgtatgaaggcggtctttcacctcatcccacagcgcagcctgaatcaaacatttttctacgatttcatcaagcacatgccggtttttaacgccgtggatgcgcggtccgtacgcgacattatcgtaaatggacattggaaacggattcgggcgttggaagaccatgccggcattttttcttaattggacaacatccgttttcggcgcataaatattttcgcctccaatcgtaatatggccttccattcggaaaccggggatgttgtcattcatccggttcaacgtgcgcaaaaacgtggattttccgcatccagacgggccgatcagtgctgtcacatgcttttccggaaatgccagattaatatcataaagagcctggaagtttttataaaacacatttacacgctcggcacggatagcggtttggttgtctgcccgtttttccaatactgctgccattttgcatttctccttttccaccgggatttagccgaaaaagccggataagtagtcccttgttttttggttttccggtttggtaaatattttcgccgtgtcccccgcttcgatcagcgcgcccatgaaaaagaaggcggtcttgtcagaaatgcgggcggcctgctgcagattgtgcgtgacaatggcaacggtatagtcttttttcagttcgagaatcagttcctcaattttaccagttgagaccggatcaagcgccgatgccggttcatcaagaagcaggacatccgggttcatggcgagcgcccttgcgatacagagccgctgctgttggccgcctgacagtgcaagcgcggacgtatgcaggcggtctttcacttcatcccataatgcagctttttttaagctttcttcgacgatttcttccagtattgcttttttcttcacgccatggtgcttcgggccaaacgcgacattttcaaaaaccgattttgcgaacggattcgggcgctggaacaccatgccgatatgcttccggatttcaaaaacatccgcgcacgaaagggtgatgtcggctcctttataaaaaatcccgccggacatcctgcagcccgcaatttcatcattcatgcggttcaagctccgcaaaaaggtggattttccgcatccggacgggccgattaatgccgtcacctgatgctcgggaaatgcgaggctgacctttttgatcgccgctttttccccgtaagaaacacttaaatttttggttttgatgatgatgttcagtgcttccggcatctgcccgggaatttcaaccgcgggccgcaccattttttcattccgtgccagcatcgatactgccaagggtcattcctccttttattgtgaaagcagtaagggtccgtttttttcttgttaaagtgaagcgcgcgcaagaacgggcttgatacaaacgcctgccatgtttccgggcacccttatttacccggttgtgatcattcccgctgaaaataaagtgtaaaaaagctagatatggtgccaaatagacgcaacttcccgtgcaccctcattcatccggttgtgaagctgttgcaaatgcaccgatttaaagtaggcatggcgcgtttccagatgaatacggcgccttcattgcgaagtcatccggttatggagccatttgccgacaaaccttgctgaaaaattaaagatgagcacaaacaggatcagcactgcggacgcgccgcttgatacggacgcggcatccggcataaggccttccccgttgattttccaaatgtgcacggccaatgtttcagccgggcggagcgggttcagcggggagttcatgctgaacgggttccaatttgaaaaatcaagattcggcgaactcatgcctgctgtataaataagggctgccgcttcgccgaaaacgcgcccggaggccaaaatgatcccggtgatgatccccggcaaagcagccggcaacagcaccgattgaatcgtttcccatcgtgacacaccaagtgcaaggcccgcttcccgctgcgccggcgaaatggcacgcagtgaatcctccacgacccggaccagtagcggcaaattgaaaagcgccaaagcaaacgcgccggacaaaatcgaaaatccccagcccatcgacaggacaaagaatagaaaaccaaacagcccgaccacaatagacggaagcgaagacaacacttcaatcgccgtccggagcaaatccgtcagccggtttttccgtgcatattctgccatataaatgccggcgccaagtgcaaccggcatgctgatcgccattgtcagcacgagtaaataaaaggaattgaacaactgcggcccgattcccccgccttctttaaatgtttggggaggggatgaaatgaatgaccagctgatatgcggcagtccttttacaagaatgtatccgacgagccccgcaagaatggcgacgataaacacggcaatgaagtaaaaaacggatgttgcgatacggtctgctatttttgctttcatgatgcttccctcctgcggccgataaaacggacgatgatgatgaagacgagcgacatgaggagcaaaacgagcgccagcgtccagagcgcgttattttccacgcttcccatcacggtattgcccatgcccatcgttaaaatgcttgttaaagtggatgccggctcgagcaatgaacggggcatcaccgttgcgttgccaattaccatctgcaccgcgagcgcttcaccgaatgcccgggccatcccgaaaataacagccgttaacaggcccggccgcgccgtccgcagcactactttgtaagtcgtttgccagcgcgtcgccccaagcgcaagcgaggcttcccggagcgaatcgggcacagcgcggatggcatccaccgacaaactcatcacagtcggcaaaatcatgaccgcaagcacaatggttcctgccgcaatgccaaatccgcttcctgatacatgttcacgaagaaacgggacgacgacgcttaatccaataaatccataaacaaccgacggaatgccgacaagcaattcaatgaccggctgcaacattttttgcccccgtttagcggaaatttccgtcataaatacagccccgccgattgcaagcggcgcacaaatgatagcggcaagaaatgttacggcaaaggaaccggttatcatcggcaaagcgcccgcaaccggggtcccggcagcatcctttttgcccgggttccagtcttttcctgtgaaaaattcaaagacactggcgtgatgttcaaagaaaagggcaagcccttttgatgcgacaaaaataaaaatcgatgcggcaacaaccgccatcaaagcaatgcaaatcagcgtcatcattttcccgcgccgttctattttgattttcgaacgcggttttgctttatttttgacaacctgttctgtccatttgagtgcattttcactcacgttgttctatccccttccggttaggtttctaaaaacgggcaagattgccgctttagtttccggataaaatttctgctctgcaggcctttccgggtgcagttttcaaaagcaggcaagaccggcaactttgattttcgaatgcatttctgctttgcaggcggcctgcgctgcctgctcgactgcttgttcgttcacgttgttttattctttacggttgccattttcaaaacaggcaagatttcggcaactttggaaatcgtatcgtccaggcgatcattctgctgcttcgcagttcgcagccccgcaaagttttaagtgcgtgccgctttattttgttgtcacgtttccgccggcatcccgttcaacttgcatttcagaaataggcatatacccgagttttggaacgaggtttttttgtacttcatcagaaagcatgtaatcaataaatttttccgttaagccttttgcctttccttttgtatacatatgttcgtaagcccagattttccatttatttgttttgacattctcttccgccggttcaacaccgtccacttttaaagctttgactttattgtttatataagagaatgcgagatagctgatagcccctggtgtttcgttgacaattttttgcacggtacccgaagagtcctgttcctgtgctttcactgcagtagcgccgtctaaagcctgtttttcaaagacggcccgtgtgccggatccttctgcacggttaataacaacgattttcaggtcttttccgccgacttctttccagtttttaattttgccggtgaagatgccgatcagctgctgttttgtcaggttatcaacgccgatgtcctgatttgcaaccggcgcaaacccgacaacggcaactttatggtctgtaatcttgcttgcatcaatgccgtctttttcctcggcaaaaacgtcagaattcccgatttggacagcgccttccgcaactttgctcaatccggttccgctgccgccgccctgtacgttaatggttgcgcccggatgatcattcatatattgtgccgcggcttcctgcacgagcggctggagcgcggtggaaccgactgccgtgatgctttcctgttttgtgccgttgccggatgttgccgtcccttttgcattcccgcacccggcagcaatcaccgcgaaaatcgttaataagccaaatagcgctgcaaactttttcttcatttttttgccccctgttttttattggtttgctccttgcacctttaaagataatcgtgcggtattaagcagatatgaatggaatgttaagagtttgtaaagatgatagaaccaggtgtaagattttaaagagtgattgtcacattttaggcaaaaacattaaaaatagaagaaaccggtttgtttataatagaggtaacagagactgaacggaggtataaaattgaaatcggtcgtgattattggcgggggcattacgggtcttaccacattgtacgagcttcataaacagatccaaaaaacaggtgcacaggcaaccttagcccttgtggaagaaaatccggaagccggcggaaagctctgtaccgtccggaaagagggctttattatggaaacgggggcggattcaatcgttgcccgcaaaaaaggggtagccagctttttgaaagaactcgggcttgaaaaccggatccgccacaatgctaccggcatctcgtatctttaccgggaagacgggttaaaaccgattccggcagaggcagtgtttggcattccggcaagtttggatgcgctttttggcagcgaacttgtttcaacaaaagggaagctggcagcgctgaaagatttgtttacgaaaaaccattcttttacaaaagacagttcggccggggaatttttggaggcttttttcggcaaagaactggtgaagaaacaaattgcgccggtgctgtccggcgtttactccggcaatttgtatgaactgacattggcaacaacgatgccgtttcttgttgattataaaaaccagtatggcagcatcatgaaaggtttgtccgaacataagcaaactttcttgtctcctgagaagaaaaaatttgtatcgtttaaaaacggtttggccgaactggctggccggctcgaggaaaaggcagcgggcgctgacatcataaaaggggtaaaagcagatgtgcttgaacggcacgaaaaaggctatactgttgtattgtcggacgggcgcaggcttgaagcagatgtggtggtgcttgccgtaccgcatgctgcagcgaagaaactgcttgcggaccctgcgttggatgaggaatgggggcaatttaaggccgcttcggtgatctccgtttatcttggttttgacgtgtcggatgcagtcttgccgaaagacgggacgggctttattgtttccggcggaagcgggctcgcttgcaatgcctgcacatggacaagccggaaatggccgcacacgtcgaaaaacgggcgcctgctgttgcgcttgttttataaagacgcggatgccgcactgtttaaccggctgaatgctatggatcaggaggggctgattgaaacggcgcttaaagatgtccggcaggcgctcgggatcagtgcacagccagtggcagcggaagtgacaaaatggctgggcaagatgccgaagtacgatttgcaccaccggcagagggtagaagcgctaaccaaaaagctatcagcaagcgacccggacgtggtgctcgccggttgctcttactacggcgtcggcatcgccgattgcatcgtgaatggaaaagaaacggcgggaaaggtaatggaaaaactaagggagcagggcagtttaaatgtgtaaatcatgtattgccgaatggacaaaacttgcagttctcccccttttgtccttcatcccgcttatgaacacctcccatatccgcaaaaagcaacaggccgggcgcttttaaacagcgtccggcctggtttgcgtccgtggcagggtgactataaaggtgctgccttttccttcctcgctttccactcggatcttgccatggtacgattcaacaagatgcttaacgattgcaagaccgagcccggtgccgccggactgccttgaccgggctttatcgacccggtaaaaccgttcaaagatgcgcggcaaatccttttcagaaatgccaatgcctgtatcgcttacgatcaagtccagttcattttccctttcgatcaggctgatttcaatcctgcctttatccggcgtataggcaatcgcgttcgttaccaaattcaacaggatttggcggagacggtctttgtctgcttccatcatgacgtgccgcttttgtggcaggacaagttccagctgtttcttttctattctcttccgcatcgtttgggcggtctctgtaatcacatcgaccacattgagctgttccattttcaacggaatgcggtgctgctcgatcctggacaaatcgagaatgtcggaaatgagccggtgcagccggtcggactcgtcatagatgatctttaaaaattccctgagtgtcgcttcatcatacatggcaccgtctagtaacgtttccgcaaaccctttgacagaggtgacgggcgttttcaattcatgggagacatttgcgacaaattcgctgcggatttgctcaagccgccttgtttctgttacatcatgcaggaccgcgacaacgccgcgcagctctccgctctccccgacatacggcgcaatatgggcatcgagaatgcgctctttcgggtaataaagatgtacctcatcccgaaaccgttcacccgtttttaaggaacggtcgatcagctggctgagcccgaaactttttcccgcttcaatatggcgctttccaatcaatttgccggacgacaaacccgtcatttcctccattgcccggttcacaagcatgatccgccccgatgtctgaataagcatgaccccgctgtccatattttccaatacggcggtcagctgctgctcgttttcatcaatctcattcatttgctgctttaagttatgggcaagattattaatggcttttgtcagctgccgcaactccccgcttgcatttatatggacgcggctgtcataatcttttttaataaggcggttgctgacctcaatgcttgcttcaatcgggcgcgtgaattttcgcgccagcacatagctgatccagccggaaatgaggaaggccactgccatcgcaagcccgaggctaaaccacagtcctttaagcacggcatcaatccggtcaagcgcaatcgaggtccggatcactgcggtgactttcccgttttcttttaccgggtttgcgacatacatcatattgtacccgagcgtatggcttgagcggatggactcaccgcttgctttatgctgcgttatcacctgcctgaattccggccggtttgcgtgattttccatttttgccggatcatcgtccgaatctgcgagcactttcccgtttgtatcaattatggtaatacgcggttcgtggttggaataataatgccgaacttttttttgcagtatatccggcttgccttttaacgtttgcgggcggatcgttttcatcagcagatctgcatcctgggaaagctgcgtgcgcaccatgtccatatatgtatgttgaatcatatcggcaacgaaaaagccgatggccagcaatacggcagccaaaatcgataaaaatgcaataaaaatgcggatccataatttattcatcgcaaagccctttcccgctacatcacttccattttatagccaaaacccctgactgttttaatatattgcggctgtttcgtatcttcttccattttttcgcggaggtggctgatgtgcacgtcgacgattcttgtatcgcccgcaaaatcgaaattccaaacggcatccagcagctggtcgcggcttagcactttcccggcgtgatttgccaaatacaatagcagttcaaattctttcggggtcagctccagttttttctctttaaaataggcttcgaattgttccggtaaaatgcgcagatcgcccactttaatcgcatcagcggtttcttcttctgtttttgtttctgcccgccgcaggatcgctttcacgcgggccaccacttcccgcgggctgaacggttttgtaatatagtcgtctgccccgagttcaaggccgagaattttatccagttcatcgcttttggctgtcagcattaaaatgggcgtattgattttcccaagccgcagctgcttgcaaacgtccatgccgtccatgcccggaagcatcagatcgagaataatgacatcaagtttttctctcctcgctgtatcatatccctcgtttccgtcactggcagtcagcacttcaaaaccggcttgctcgagattgaattttaaaagggtcacaatggatggttcatcatccacaaccaaaatttttttagccatctgttatagccccgctccctgacttgtttttcttcattgtatcgtgcctgcttttccattgtaaagccggatttcaagcattccgcgcgcgaccggaaaatatgtaaatgttaagcgtacatttggatgagaaatactgccagaacggcaataagattcggcaatccgaacaggaaaaaagcatcgtcagactgaatcttgattggtgatgttcttttgtttcagaaaaatagttagcccgtgtctctatgccgcccacaaacgcccccatcgtgatgccggagaaaacaatcccaattgctgccgctatcccgcagatccaataggtttttgaaaaatccctggtaaacagccctgcaatgatgccagccgcagcaatgatcattccggttataacagcatatgccttcaatttttgccccctccttttctttattgttatattcagcctccgtcataaaatgtcctgcttttaagacgtctcttgttgcgtgttttttaaatctccttcccacacgcagagagttttaattgaagtatgtgtaaaattttactcgaaggggcagatgagtggaaaaaaatgggaagacgctctatcatctaattgtacacttcaagatgaacatctagagagagaggtcttcccatggatattatatcaataattgctggattattaaaggatacaaaaagtcttatggaatttgaagaacagcttaaacttttgatgcagaaggcttttacacaatgggttggggaaatatttgaagagttagataaaacaattaaacaggagaagttagaggagggctgggtgtactgccggagtgataacagaaacattcagtttctatttggaagtgtgacctttaaacgctcattaatgcatgacaagagaggaaattcccattatcctctggatgaatggttagggctggtaccacaccaacgatacagcccgttaagcattttggcaagggctctaaagaagcttttaaggatgagtatatcctttgtgaagaagtactaaatactattattgagcaatttttaaaaaagttacctgtcagctatcaaaaacacctaattaaagcagcttagctctaaattagccggggtaaccgcaatggtgacaaggggtttgcacgattttcgtactttcaagttttagtatataatatgaaagatacattgcctctctgtttcctattgagaaaaatagtaaacatgcaaaagccatattaaaaatatcaaagatacttttatctggaaattcctgccctctacgtaaaaaaataaaaactcagccacatcccggcctgaattccagtttaaacagatatcccaaacaggtgagctccggccatattcgcccgcttctcatactcccgcaaactcatccatacattcttccctttttttcgtcctgttcacgcaaatactgtaccagatcgcggctggagtggccggcagagtatgtattccaggttcttgagaatgcttctatacttcccgcatcaaaagaaccagttttaatcaaatcaataatttctgccgtcgtacaggcaatcggcccggggacaagctggtcatacggttcccacaacccccgtgtggcctgatagctttccagatcatacggataaaagatcatcgggcggcctaacagggaaaactcaaaagggacagaagaataatccgtgatcaagtaatctgaaccagcaataattcgttgatgttcatatcatgggggcagtccatcacaaaatcaggatactgcagcagccctgcccctttgtttacagccggatgaaatttcaccgcaaaaatatactcatccttcagttcatcataaagccggccccaatcaagcggcacttcaaactggtccagatgcgggtccctgaaagtcggggcatacaagatcacttttttcttttgaaaggcaggatactgtttgtacagcttcttctttatgtcccggatcctgttttggtcaaaaaaaagatcggtccgtggtatgcctgtgcaaagaaaattttcaggaggaagcccgaaagccctcataaaaatatgcttcattttttcagaccccaccactacccggtcaaaatgggcatacacttttttaaaccgcttcaatggcatgcttgcccctcgtgcggatcgttttgtcttcaaggccgaatgttttaacggcccctgctgcatgccagagctggatgcattccaccccttttttaaaccgggcggcagccaggaaaccataatagttatcaacaatcacaaatttcgatgtcgcaatgttgtataggctgcggataaaatgctgcaaatttttcatttcaaacagaaataccttctcttgccggacggtttccgcaacacggcgatagcagaaagaagtacaaacgaacactgtctgaaaagaaacgggatgctttttcaattcctcatacacatataaactgttctgctcaaatgagacgacaaatgtgattttccttttcaaagggaaaattttacataatgtaaacagtacgcgaaaaagcagtaagtataaggaaatgaacagttccctaaccatttttcacagaaaagaggtccttctttatttttgatttcgttaaattcatccgatgaaaggccgacgattaaatggtcgcctaatactcttgcgcgtttcagtaaattgatatgcccccaatggagaaggtcaaatgttccgtatgtgattactttttttcatacagttctctccctgctaaatgtaataggcaacattcctgcacactgcgacacttttcattatttttccctaatctttactcattatatgtctatttcaagcagaattcaaatacttcttgaatgaggtatttgtcaagttttctcgataaggtttaaatatcgggtatcacgagacattctctttgtcactttcaattgtccaatgttccgtgtgtgattacttgtattcatacagttctctccatgctaaatgtaataggcaacattcctgcacaatgcgacacttttcattatttttccctaatctttactcattatatgtctatttcaagcagaattcaaatacttcttgaatgaggtatttgtcaagttttctcgataaggtttaaatttcgggtatcacgagacactctctttgtcactttcaattaccacgcttcgcttgcttttttggataagtaggggctgtttcgaaataccagttatattactgtgcataacgagcgtattgacaccacaaaatttactcgtttttttcgggcagctggcgagtcttctcgctcttatctcgctgcggtgttctcctggcttgatttttcccgaagaagtcccgtaaatttcgcactcaccaacgaactgtgcacaagatcgttttggaaacagtttctacttatccaggcttagaatggtcgttctataattttgcttaaatgttccattaccgatgaactgcttaaatacagggggtaacagatctttgctttacaccaattggcggatatgcggactactatgactggtgttaagttccgttgccatcttgtagttcttgaacggttactcaagtttcttattaaacatgctttgtttgacctttgccatggcttctacaccaacttcacttcaatgcataccccttttcttcattctgaacgagatattcctttggtttgttcccatcttctcaccttccggcacgttctaaccttgtctttcccgtttaaaatgcatttccgtcaaaaaatttgatttaaaaatgggatcaatcactttttagtttataaagcagataatcatatggttttccctctaccatttgaaattgctttttgaccaacctgtagttttgctttaaaagtggaatatggggcggccctgatttccaccgtgactgccttatgaccacaaacttcacctttttttccataatataacgattttgtgcttgcatgttttccggataaattttcgggtctatattctgcttttcaaaatatttcacattgggaactatgtttgctgccaagtaaaagccgccgtcnnnnnnnnnnnnnnnnnnnnnnnnnnnnnnnnnnnnnnnnnnnnnnnnnnnnnnnnnnnnnnnnnnnnnnnnnnnnnnnnnnnnnnnnnnnnnnnnnnnnttatcaatctatacgaaagtgtacaaaaagagtgtcttggaatcccgatatttaaaccttatcgagaaaaacttgacacatactaattgaaagattcctaccattttgttatattaaaaatgatcgttaaaagataaaacatggacgcccggcttcgaatattgcgtattgtcaccctgccggcccggggatgtccggctggcaaaatggatggatataaacgcaacgctagacggataatgattaacatataggaaaaaggtgatctggaaaatggcatttgtaattacccaaccgtgcatcggcgaaaaagcggccgaatgcgtggatgtatgccccgtggattgtattgccgagggggaagaccagtactttatcgacccggatatttgcatcgattgcggcgcttgccaggcagtttgtccggtagaagccatctatcatgaagaagaactggaagaagaggatatggccttcctggaaaaagcccgcaaattttattcagagtaaaaataacccccgcaccatatgcgggggttatttttaaaaccgggcgttggcacggcttaatcaatcgcattccggacttctttcaccatttcggatacggagacgagcccgccgccggaaaggtaccagtagcccgggtcaaggtaaacgatatgtttgttcttgtaagcattcgttttcttgacgaggtcgttttcgatgatgctcttggcatttccgccctgcccgatggctgcatcacggtcaatgacaaacaaatagtccggattggttttcacgatatattcaaatgacacattctgcccgtgaatggatgctttgatgtgtttgtccgcagccggcacaccgaatacgtcgtgaatgatgccaaatcgcgaacccggcccgaacgcgctcacctttccgccggtcgtcaggacaatcagcgctttgccgttcactttttccgcttttgcatgcaggctgtcgatcgaatcgtcaataccggccagttgttttttcacggcatcttctttattgaaaattttgccgagtgtttccatgttctctttaaaggaatccatatactttgccgtatccagccccatataaacggtcggggcaattttcttaaattcattgtagttgtcttgctgcctgccggaaatgatgatcaggtccggatggatttcactgatcttgtcaaaatccggttccatgaggccgccgacattttcatacttgctgcttttgtattttttcaaatatggcggaagattgtcctgcggtacgcccgtcactttaatgcccaacttatccattgaatccagcacgccgtagtcaaacacgacgactttcttcggattttccggaacttttgtggttccgagttcatgctttaccgttattttctttgttgaggcattgctgcccccggcactctcttttgtcccgcacccggcagcaaataccgctaacagcaaaaccatcatgacagccaaatagctctttctcatcgcgaatcctcttttcatccgtaatataagcaaaatttattttggcagtaatcctgaatttggatattcatatcgtaaatttcctttaaaacagacgggcgaatgatgtcatccgtttttccctgtttcacgattttcccgtctttcatcgccacaatgtaatccgaataaaacgatgcaaaattaatgtcgtgaatgacaattaaaacggtcttcccaagctcatcggcaagcttgcgcaacactttcataatctggaccgaatgtttcatatcgagattatttaacggttcatcaagcaaaatatactcggtgttctgggccagcaccatcgcgatgtaagcgcgctgccgctgcccgccgctcagttcatccaagtaccggttctcgtattcttccaattccatataacaaatcgctttatcaattattttttggtctgcatccgtgagccgcccctctgaatgcgggaaacgcccgaatgcgacaagttcccttactgtcagccgaatgttcatatggttggactgcttaaggatggatatttttttcgccagctttttgctgtttgtatggctgacggcctccccgtctatgtacacatccccttcatccgaaaattcaagccggctgatgatcgaaagcaaggtgctttttccggcaccattcggcccgataaaagaagtgatttttccctttggaattttaacagacacatggtcaatgaccttcttgctcccatagctttttaagacattcatcacatttaccatgcgcgactctcctttaaaagtaagtaaataaaatagatgcccccggcaaaattgatgatgacgctgagcggaacagagaactggaagactctttccacaagcagctgccctcctgtcaggaagacgacgctgatcagcattgcacccggtataaggattgtatgccggtatgtatcaaaaaattgataagcgacgttgacaacgagcaggccaaggaatgtgattggcccgaccaacgccgtcgagacggagacaaggatgacgacaatcaaaagcagatgccgcactacccggttataatcaacaccaaggttgaccgcctgatcccgcccgagcagcatcacatccataaacttggcaaaacgcaaataatacaacccgcacaatacaacaagcacaaaagaaacccacagcaaatggacattcacattgttgaagctggcaaacattttatcctgcagcacctgaaactcattcggatcgatcagcatttgcataaaagaagtgaaactgccgaataaagtgccaaaaatcatcccgatcaaaagcagaaaatacatattttgcctgctccggcgaagaattaagtggaacaaaacggcagaaaacagcaccatcgccacgagtgaaaccacaaaattgacatggctctgcatcatcgttagcgttttggctcccattgcgaaaacgaccgccgtctggatcataagataaagggaatccagcccgagcacgttcggcgttaaaatgcggttgtttgtaatcgtctgaaaaataaggctcgaaaaggcaatcgcacagccagtcaggatgatggcggaaattttccggattcttgacgggataatatagttgaaatcccagtaagatccgatgcaaatgtatgctgcaatgaggcctgatgcgattacggcaagcataagcagtttggaacggctatgcataagcgtgcctcctcagcagcaaatatacaaaaatgccactcccgatgatgccggctgttaaactgatcggcacttcatatggataaatgacaagacgccccaaaatatcgcaaaacagcaggaacactgccccaagcagcgccgtcaccgtaatgctttttttcatatggtcgccgcgataaatggacacaatgtttggaataattaagcccagaaacgggatggtgccgactgtcagtaccgttgccgaagtaatcagcgcgacaagggcaaggccgatattgatcacctgcttgtaattcaagccaagatttttggcaaaatcttcccccatgccggcgaccgtaaaccggttggcaaacacatacgcgaccaaaacggccggaactgctaaataaagcatctcgtacttccctttcagtacgcctgaaaaatcgccttgcagccatgaagaaaggctctggactaagtcgtatttatacgcaaaaaaagtagatacagaacttacgatattgccaaacatcagcccgacaagcgggatgaaaattgtatcgttccatttaatccggcccagtattttcatgaacagcaaggtgccggccagggcaaagcaaaaggcaaccgcaattttgatcagcgggcttgccgcagaaaacaggatgatcgcaaccaaaatgccgagccgggcacagtccatcgtgccggctgtcgtcggggagacaaatttatttctcgtcagctgctgcatcacaaggccgcagatgctcatgcccatgcccgcaatgataatgctgatcaggcgcggcaggcggcttgccagcaaaatttccgtctgctccttgcttaaatggagcatatccgccggtctgatattttctgcgccgatgaaaattgaaatgatggacaggacggcaagcaggggcactaaatatctttttttcattccattcgtactcccccgttccttttgtcagctcgttgtaattgattttcattatcaatgataattatattgatagtgagaatcattgtcaattatatttccaatatttttattgtgctttccgtagtatccggaatggttggcatcatggccattgaaaatgcacccggcctcttgaaaaagtttctgtacgccatttttttcataaaaaaacggcggaacctccttttggaagtttccaccgctttcattttcctctcatcccacctggttcggttccccgttgaggttgttttctacggtcaggatgccgagttcgtgatgttcgccttcataaagcgcgccctgggcaaagtgcatttccccgttcgtgccgatgacttccagtttgcaataagccgagcttttttgcaaggcgcggtagaattcatccgtattgtgaacgggctccccgttgcatttggaaatcacttcaccgattgaaagccccattttttccgcttttgatcccggtatgatccctaaaatgatcatgccgttgttctgctgtgtaaaataatacggcgcgttgttttcacgcatccggtggtgaatggagatccatgctctcgcgacaatggcaaaaacggctgctactgcaggaaaataaggaaaatagagccctgctgctccgattgcggtcgtcatgatgcccgcccaaataacccaggttccgatccgcttcaatgcagactgcggtaaagtgctctggatttggtgctggaaaccgattaaaaacgggacaagcaccagtgaaaacgtatgcccaccccagttcacaacaggccaccatgaagcgttgaccgaaagcgggcctgcgggcagaaaacaaacgaccggcacaagccagagttttttggccacaaatgcgccgacattcaaaccgcgccggcttttccgcagtttcggggaaacatgcttcgtgccgcttgtcctcaacagcacgccttccgctaacaaaagaaggcctgctaaaatggaaagcccggcaaccatcgcatcggttatgccgctcatccaatccggcagttgaaccggcagccatgtgaaaacaaaaaacaggagtaccggtatgcccgcggtaaatgccggtgagagaaaccggaactggcccacgagcgaaaataaaatcgtcgcagccgccaccacagcaagaacaggccatgacacttgaaaccctgccgccactgagagagcggaaaggatcagcccgcatacgagcccggcaggaaataaagaccgcagttcaagcgatcctttataaaccctgatatgaaaatcgtttctttcccgcttcactcttgccgcacccgaaacgagcgcgagcaacagcgcataatagaatatcggatggagaaaaaatcttccgatgccttttaacacttcaatgagccaaatctgttccaaccgaaacaccatcccccgcacgtacctatttgtagtattattttagcagattttggcgaaaagcgcttcgaaattccgggtttttttccaggctcacagattttctgtccaaaccggcatcaccgcttatgcaactgctccgggaatatcctcatgccggcaccgcgccatgcaaaaagctgaaacaagccagaaattggcaaaaacatgaggagcgagagcaggaagaagcaaatttgctgaatgttggcttgcagcccggcccgctgaagcggcgttatttgctgacaacctttaacgccacttgcagctgcaaatcatttttttcctcgcgcgccattttgtacagcgatttttccaattcgtcggccgttttttgattgatgctgccggttgccggaaggcctttatcaaactggaacgccttaacggcattttccgtctggatatcgaaataaccgtcttccctgcccggcgaaaagccaaggctctttagcatttgctgggcggttttgatttgggcgttgttcatatcctttttcaacatgcggctgatttgcaaagcctggacatcgaaataatccggctgtttcacttcaatcgtcggggcaatgcctttatgatggatccaatggccgtcgggcgtaagccatttaaacatggtcagtttgatgatgctctcatcttccatcggcaccgcttcctgcaccgtccctttgccaaatgtcctggcgccgattaatggataattttccgtttcatgaagcgctgccgccataatttcagaagcgcttgcgctacctttatcgacgaggaccgcaaccggataagccttttttttcttcagtttggacacatactggacacggtgcccgctccgttcctcaatttgcaaatacggcttgttccttgtgacaaactgcttgagaatcgcttcaacactggaaagaaggccgcccggatttccccgtacatcaatgacaagcccttccatgccgcggttttcaagtttttcgagctgctgcgcaaaatctgttgccgtatctgttgaaaactgggtaatgccgatataaccgatttttttcccgtttgcctttttcattttcgagtagaccgtgtcaagcggaatttcatcacgtttgaccgtcactgtcatctgtttgccggaaccggcccttgaaatgcccagcttcacattggagcctttttttcctctgattcgtgttgtcacttcatataagtccatgcctgccgtactttttccgttgattgttgtaattacgtcttccgggcgcagtcccgctttttcggccggggagtttctataaggagaaacaatcagtatttttccgttttttttggtgatttcagcgccgatgccttgaaaagaggaatccagcgtgtcgttgaattgcgcagctgtctctttgtccatatagacggaatacggatcgtccaatgtactgaccatgcctttgattgcgccttccacgagtgttttttcgtcaactttccggacataggaacttttaattaattggtatgcctgggcaatttttgcgagatccggcatattgcttgtcccgccggttgtttcctggcgggcgggggctgccttgtccttttgtaaaaaccattggcccgccgtatagccgccgcctgcaccggcaagcagcgatcccgaaatcgcaagcgccagccattttcgtttcatggtgatgccctccttgtacaagaagcgccgccaaaaagcggggctcttcctctcgataattcaatatatgtacaagccggggggcatatgccgggcagcggaaaaagccggtgaaagtcccgcagaaggtgcaaaacaggctgccgtgaagcgaaaaaatgggtgttgcaaacgggctccggtttctttaggggatacgacatccggccatgctgtccacgaaacggcacgaacggcggatgaggccataaacaattagattcaaaacggggtaaaccgtcactttctcgccaattggattcaaaacaggtaaaaaaagaagcctctcccgccaagccgagcaagcaaaaacggaagaagccgaaaagaggttgaggggttctcccctcgctgaaatgctatcttagaatcacaaaggaacttaaatccgcccggataaccggttcacgaaacggcatccaattgcggaacaggccggtaacctgctgcaaagtcttcaatcatggcgctggctgtcggaaattttccggcacccgggccggtaagggtaatttttccaaccaggctgccgtaaattgtgacggcgttgttgacgccttccaccgcataaagggcatgttcggaaggaataaggacaggcttaacggatgctttcagcgtgccgccgtcacggtatatgtccgcaatatgcttataacggagccccttccgatccgctttttcaatatccgcaagcgagagcccgcctataccttcaacttctactttctcccagtccggctgggttccgaatacgagccggcttaagatcatcagcttgcaaaaagcgtcctgcccttccacatcattgcccgggtcagcttctgcatagccgtgctgcctggcgatttccaacgcttcttcaaacggaagatgtttttcgcgcatttccgataaaataaaattggatgtgccgtttaaaatcgcctgcacacgctggatgtcattgacctgaagctgctgggaaatcgtccgaatcacagggatgccgcctgcggttgtcgcttcataaccgacaaacacgcctttttctttcgctttttcaagcaacacattcccatatcttgcaaacatgactttattggcagtaatgacgtggcagcctttttcaatcgcttgtaaacagtaagaaaagcctggttcttccccgacaatcgcttcaaacacgacttcaaggccgggaatggcaagaatttcccggaagtccgtcgtgacgagcacagaactgtcaatgttccgctttttacgggggtttttgatcagaaccgctgcaatctctacctcggcatgcagcttttctttcagctgctcccggtgggtccggacggcttcacacacgccctggccgaccgtcccgaagccgagcagcgctgctttaatcaccctcatttatccaaaaacctccctgcaatatagcgctattcgcctctgaagcgttttgttcatttaaaacatcaagcggcccggcggtctccggtgcagccggcacccataagctcccgatccggaacaggtgtgcaggccgtccgtgccgacaaaattgtatagtgggatcagcccggaacggatcccgtgcaagttttccggatcgcctgttggcattcgccgtggcggccttcgcacgaacctgcctggcccgttacctgcttttaccgggctgtaacggccgtcgcttttgtaatggcttgatcgaggtcggctgtcaaatcttcgacggcttcgagcccgacagacaagcggatcaaatcacccgtgacccctgacttttccagttcttcatcgctcagctgcgaatgcgtagtcgttgctgggtggatgatcagcgatttcgcgtcgccgacattcgctacatgcgaccacagcttgatattgtcgatcacgcgcctccctgtttcccggccgcctttcacaccgaagttaacaatggagccgtagccgccgtttaaatatttttgcgccagctcatgggacggatggtcttcaaggcccggataattgacccatgcaacatccggatggtttttcagaaattccgcgactttcaacgcattttcgttatgcctttccacgcgcaaatgcagcgtttcaagcccttgcaggaataaaaaggcgttgtccgggcttaaagccggcccgaagtcgcgcaaaagctgaacgcgaagttttgtggcgaacgcagcctgtgccgtgtcgacgccgtagcgcaagccgtggtagctcggatccggttcgctgaagtccgggaatttctctgtgttccagtcaaaatgcccgccgtcaacggcaacaccgccgatcgccgttccgtgtccgccgatccattttgtcgccgaatggacaaccacgtccgctccccatttgatcggattcgagccatacggagaagcaaacgtgttgtcgacaatcaaaggaatgccgttttcatgggcaacttccgccactttttccacgtcgagcacctgcaggcttgggttgccgataatttccgcatacaatgctttcgttttcggggtgatcgcctggcggaacgcttcagggtcagacccgtccacaaacttgacgttaatgccgtatttcggcaatgtcacggcaaacaaattatatgtgccgccgtaaagattgctggcggatacgatgtcgtcgcccgcacgcacaatattcaaaatggagaaggcaatagccgccgcgccggatgataaaccgacagccgccgttccgccttccagtgcggcaacgcgtttttcaaacacatccacagtcggattgccaaggcgggaataaatgaaaccttcttttgataaattgaagacgccctctgcatgttctgtatccggaaaaacgtaagaagtcgtccggtataccggcacggcgcgcgagcctgtcgccgggtccggttcctggcccccgtgcagcaataaagtttccggttgtaatgatgattgtgtcatttttaaatcctcctggttttttaaaattttcctgcgaaagatggaagaggaaatgaaaaaccctcttcgtaagggaagagggttacaatgtatgtaagttcctcccttatctttcagacgcatgtctgtaggaattagcaccttttcaggcaaatgcctgaaggttgccgggcttcgcagggcctagtccctccgccgctctcgataagagtttcttttcataattcaattttgaatgacttattgtttaagattatagaagaccaatggcaaaccgtcaaccttttttgaaaaattttctttttcttctacaaaattggcgataacagccgggaaatggactctttaaaccgtacataaagcggccggttctggtaaacatggagcgttaattcggttgatttggccatgtcgtcccggaaaatgccggcaagtgtgccggaaagctcgcggtcgtacagcacggcgttcacttcaaaattgaggcggaaactgcgcacatcaatattggccgtgccgacggaagcaattttcccgtctacgacaatcattttcgcgtggatgaacccattttgataaatgtacactttgacgcccgtttttaacagctggccgatgttggaaagcgtcgcccagtagacaaacatatggtccggtttatttggaatcataatccggacatccactccggataaagcggcaagcgtcagcgcgttcaggaggctgtcatccggaatgaaatacggtgtttgcaaataaatatattttttggcggaattaatcatcttaatgtagctgtttttaatctgctcccattcggaatcggggccgcttgagacaatctggatatcggtttccccctgcggcgggatgaccgggaaataacgttcttcatttttcacatcatgcggcgatgcctgattccagtctaaaataaagcgggtctgcatggcataaacagcgctcccggaaatccgtaaatgcgtgtcccgccaataaccaaattttttattcaggccaagatactcatccccgacgttaaaaccgccgatataaccgacccgtccgtcgataatcgccaatttccgatggtttctgaagttgacgcgcaaattaatgagcgggatacgggctggaaaaaaggccgccacttcccctccggcttcaatcagcggccggaaaaatttgcggcggaacagcatccgcgatcccatatcatcataaagcagccgcacctttacgccttctcttgctttttgggacagcagttcaatcaattcatggccgagacggtcattccggaaaatataatatacaagatgaatactgtcttttgcattccggatgtcttcaaataaagcctggaatttttttctgccgtctgtgaaaatatcgacgtgattgtcctgggaaaggatcgccccgtcattcatcagcagcatataaacgagatccttatactgggctgtccgctcatcatgaaacggaaaccggttttcgcgcagcagttcaatctgctgctgggaaatttccttaatgccgatcttctcctgtaccttccagtcaaaaattttccggcggcttaaattttgcccgaatatcaaatacaggataaagccggcaatcggcaggaatagcagcaccaaaagccaggcccaggttgcgccgacatcccgccgttcgaggaaaataacggttcctgccagaataaaattcaaaagaaacaagataaccaatagtaccgttacaatcattgcgttctccttttcgtacaccctttgttcctgttgtaggtttgttcccggccggtatccgggaacacggtgaagtgttttgaaattgatataggatatgtttgcgcagcaaaaataacaattgtatcataccataatatttgcgtcttacctatcatacagcactttccctgccattgcatgcaaaaagaaccgcaccaatagatacggttctttttcacgcctttattaaaagttaacgtagtttctcgggttttgggcaccggcatgtggcggcggtgtccagcggccgttataaatttcaaagtgaagatggggccctgttgattccccggtatttcccattgcgccgatctgctgccctttgctaacgtgctgcccggtgctgacgctgtacgagctcaagtgggcataaacggtcgtgtacaacttcccgttaatatagtgggtgatcatgacgcaattcccgtatgaagaagagcggtacgccctgaacacgacaccgtcggctgcagcgacaaccggtgtcccgatgctgttggcaatgtcaacgcccggatggaacccgccggagcgctcgccgaatccggatgaaatatatccggatgccggacgtgtaaaggccccggaagagacttccggaagcggcccgccggaatggctcccagaacttgggctggccgatgatgcagcgctggttgttcctgctttcgaacctgttgatcctgcattcgtattcgtttgagcctttgctgctgcatctgcttttgccgccgcctcttttcttgcttcagcctgctttttcgcaaacgcaatcgctttttcaatggaagctttctggtcagccaggatgctcttttgttcactcagcgacattttctcttctttgaggctatctttttgtttgtccagctgtttgattaacgccgatttctcgctctcatcctgtttcagactgtcttttaatgattgtaaatcagacagcatcgattccaaatcggacagtttcttctctactgatgcctgtttgtcttttaaatcctgttcatcttttttctgttcttccaaaatttgccggtctgcttcaaccaatgtcttcattgccgaaaagcggtcaataaaatcaccgacgcttttcgcttccaaaaaaacatccaaataattaaccgaaccgccgccgtttttctgcattgcgcgggcgcggtcttctaaaatggcgtttcggtcttcaatccgctttttgatttcggcgatatttttcttcagatcagcaatttggcttttcgttgtgctgatattctgttcctgctcgctgatttttttgttcgccgattgaattttagactcaatcgcctcaagctggctgccgagagaagcctgcttttcttgaatgttggaaatctggttgtcttttttgtccatttcggattggacattggaaagtttactctcaatctcgctttttttctgctgcaaatctcctgccgcactcgcattggactggtagccgaacaggccgcccaagctgagcgtgcatacaacggcagcaggcagaatggaacgcttcttcatctttttccccctcagagcaatatggttttgttttatgtatccggggacgcaacgccccgtttttcctatgttttaaaacgaacggaaaagggtatagcataaaaatcaggcggacgggaccggaatacatccctgccgttcccgttacactttcaaataacggcggatcgacatcgaacttccccagattccgatgcagacgccaagcacgagcagcaggccgtctatgccgtaaatgaacgggctgatatcaagcatatggataatattgttttgaagcttcggctccacgattttataaacggagtaatagccgaaggaaatcagcataatcggcagaatggaccccaggatcccgagccagagcccttcgagaagaaaaggccagcggataaaccagtttgtcgcccctaccagtttcataatctcgatttcttttcttctggcaaaaatcgtaattttaatcgtattcgagataaggaacatcgccgtaaggagcagggcaatgattaacacaaccccgacattgcggcagatacttaaaacatggaacagcttttccacttttcctttaccataaatgacggattcgacatggtccattttttgaatttgtgctgcaactttcggcgtgtctgtcggctgctttgttttgacaataaatacatcatacaatgggttgtcctgctggaacagtttaaaatcatcacccattcttttaatcaattcttttaattcctgttgtttagaagaaaacttgacagaattgacggcatccaggctctcaatctcgctctccagcttttccctgtcggcagcctttgccgctaaatcgatatggacgcgaatttccacgtcgttttcaatatcggaagcaaatttattcatgttcaggatgatgacaaaaaatacgccgaccagaagcagggtaatcgttacggcacttgccgatgcaaacatcatccagccattccggccaaggcttttaaaactttcccggaagtggcgtttaagcgtattaatcttcataaccgtaacctcccagctgctcatcgcgtaccactttcccgccttcaatggcgatgacgcggtgcttgtttgtgtttacaatatcacggttatgggtagccatgacaaccgttgtcccggttacgttgatgtcttcgaggattttcataatgtcccatgaagtttccggatcgaggtttccagtcggctcgtccgcaatgaccactttcggcatgttgacgatggaacgggcgatggaaacccgctgctgttcaccgccggacaactcagaaggcagcattcttgctttatttttcaacccgacctggtcgagtacttccataacgcggctccggatataggaaggttcctgctcgatcacttcgagggcaaacgcgatattttcatatacagtcaatgtcggcagcaacttaaaatcctggaatacaacaccgatctgccgccggaaataaggaatccgtttgtcccggagctttgaaagattgacgccgttcacgatgacatcccctgctgtcggcttttcttcgcggtaaatcagtttgacgagcgtggatttgcctgcgccgctcgggccaacgatataaacaaattcgccctggttgatttttatatttaacccgctcacggccatgacaccgttcgggtactttttatagacgtcttttaattctatcatttcctcacctggctttttcaatgtagcatgccgaaatgaaaaatgtgtcaacggcaccggcaaaaaacgccaatttttgcaatacctgcacacccgtcccagtaaaagatccgcacgggatgatttgctgtaagaaaaggctgcgtaaaagcctttctgcataaaatttgacttttttctcttttcaacgcgcgagaatccgcataattgctcgaaattcgcacattaaccattatagcatcccttgccttaagcgacattacagttttgtttcaaatttcctaataagcgaattttattttttcatttttttcaaaaagattgcgttacgctcgcttcttatctcttactggaccggctttttttcagatgttacagagcagaccgtttctaagacccgcatttaaaaaaacgggccggaaaccggcccgtttttgtcattttttcttggagagccatttggcgactttttgggcatcgtctccctttaaaagccctttcggcatatctccttttccgttttcaatgacatttaaaatctgtttttcgctaagcttagaaccgatatgctgcaaattcggcccgacgttcccctgcaattggtcgccatggcaggcagaacatttttggtctgccagtttttcggcatcgccgccacttgccgtgtttttcccgccgcctgatgatggagacccattcccgcaggcagcaagcccggctgcaagcagaaccgccgccaaagctgcgcaccattttttcacacttagccctccctcctgtgcacattcttcttccattataccggatggccgcccgggcatggcaagaaatacgaaaaacgcgtaaacgcgcggctacggcatgttaaaaccttcgcccagcacttcggcggcatccatcacaacaacaaatgccttcccgtcaatggttttgacaaggtttctcaacttaataaattcagactggtcgacgacacacatcagaatcggtttttcctgatcggtaaatccgccatatgcagggagccttgtaaccccgcggtcgatctggaacaaaatctctttccggatatcctcgtatttgtcggaaataatgagcacatttttcgaacggttcaggccgacctggacgaggtcaatggtcttgcttgtgacaaacagcccgatgattgcatacaaacccttttcaatatcgaaaacagcagctgctgacaggacaacaagcccgtcaatcgcaagcacacatttcccgagtgagatgccggtaaatttatggataatttgcgcggccagatcggttccgccggttgaagccctgccgagaaacacaatcccgagccccgctccgacaccgattccgccaaacagtgcagccagcagtgcatcatgcgtccacggctgccaattttccgtcaaaaaaacaacaaacggcaaaaatacggtgccaacaagtgttttgacgccaaattggtaacctaaaaaaatgaggccggcaagaaacagcggaatgttaagcccccattgcacataggccggcttccatccgaacagcccgtgaaaaatcgtgctgatcccgctgacgccgccggacgcaatattattcggaagcaggaaaacattaaatgtaatcgcgacaattgccgacccggcaagtatgtatccatattccatcatcatcgtccggtatttgttcgccggttttctccttttctttgccatgtccatcccccttttcataaaaaaaacggatgccacacaccaatatacaggaccgcttgtttcgcacccctcatatattttctggcattgtggcatccgggcctgtcatgcgttcaattttcaggaaaacttttttcttattacgaaatatgtgagcgcaggtaagcatcaatgaacagatcaatttcgccgtccatcaccgcctggacattccctgtttcaacatttgtccggtgatcttttaccatggaatatggatggaaaacataagaacggatctggctgccccacccgatctctttctgttcgccgcggatttccgccaattgtttctctttctcttctacttctttttggtacaatttcgctttcagcattttcatggcttgttcgcggttctgaatttgcgaacgttccgattggcaggagacgacaattccggtcggaatatgggtaatccggacagccgaagacgttttgttaatgtgctggccgcctgccccgcttgcccggtatgtgtcgacacgcaaatcttccggccggacttccacttcaatgttgtcgtctatttccggcatcacttcgcacgagacgaacgaagtgtggcggcggccggctgcatcaaacggcgagatccggacaaggcggtgaatgcctttttccgctttaagataaccgtacgcgttatgccctttgaaaaggagggtgacgcttttcacaccggcttcgtcgcccgggaggtaatcgagggtttcgactttaaagccttttttctcgccccagcgtgtatacattctgagcagcatggaacaccaatcctgggattccgtaccacccgcgccgggatgcagttccaagatcgcattgttcgcatcatacggcccgtttaaaagcagctgcagctcgtattcatttaatttttccgtaaacccttcaagctcagcttcaagctcttctttcagttcctggtcattttcttctttggccagttcgtacgtgacttcgagatcctcctgttgcgactcgagttcacggtagccgtttaccatttcttttaaagcattggattcatcaataattttctgcgcttcctgctggtcgtcccaaaagttaggctccagcattctttcttccaattcggcaatgcgcgtctctttttcttctaattcaaagagaccccctgaaacccgctaatttcttagctgtattttccaattctgctctgatttccgataattccattccattcacctcattaattttttctgctgttttccgcaaaaaagaagggcggcgttttgccccttctttttttgcgtatgcctgcctgattttaagcctcaagccggccgtggcagtttttatactttttgccgctgccgcacgggcaagggtcattccggccgatgcgcacttttttgcggaccggttttttcttcacagcggtttcttccccgcccggcacgacagcctggccttttgccacttcctgccgctccaggttggtttggatttctgctttcataatatattttgccgtatcttcctcgatggatgcaaccatattttcaaacatggcaaagccttccgactggtattcgcgcagcgggtcgatctggccatacgcgcgcaagtggatcccttcacggagatggtccatcgcatcaatatggtcgatccattttgagtcaacggagcggagcaaaatgactttttcaaattcgcgcatctgttccggcccgaatgcttcttctttttcatcatagcgcatcttcacttttgccatgataaggtcaaccatttcgtccggttcttttccaagcaaatcttcccgtgtgatgtcgccttcacgcagcagattggtcaggacataatcgacaatgccctgcaagttccattcttcctcatcttcatggagcggcgcattggcgtttacaacgcgttctacgaccgaacggatcattttttcaacgatttcacgcaaattatccgccgtcagcacttcatcgcgctgcttataaatgatctcgcgctgctgccggaggacatcatcatattggagcagttgtttccgggcgtcgaagttattgccttccacccgtttttgtgcggattcaacggcgcgcgacaccattttgctctggatcggctgcgtatcatccataccgagccgttccatcatgctcttcatattatccgatccgaagcggcgcatcagttcatcttccattgacagataaaactgtgttaccccgggatctccctggcgtccggaacgcccgcgcaactggttgtcgatccgccttgattcatggcgttcggttccgatgacggcaaggccgcccagttccacgacaccttcgccaagcttgatatcggtaccgcgcccggccatatttgtcgcaatcgtaaccgcgcctttttgccctgcctgtttgatgatttccgcttcacgcgcatggtttttcgcgttcaacacgttatgcgggacgcctctctttttcaacatttgggaaatcaattcagacgtttcgattgcaaccgtcccgacaagcaccggctggccgagatcgtggcgctgcttaatatcctcgacaacggccctgaacttgccttccatcgttttgtaaatcaaatccggccggtcgtcgcggatgatcgggcggtttgtcgggatcacgacaacacgcatgttataaatgttgcggaactcttcttcttccgttttcgccgtaccggtcatcccggaaagcttcgcatacatccggaaatagttctggaacgtgatcgtggccatcgtcatgctttcgttctggatctccacgccctcttttgcttcaatcgcctggtgcagcccttcactgaaccggcggcctttcatcagacggccggtgaactggtcgacgatgatgatttccccgtcctgcacgacatagtcgacatcccggtgcatcgcaacattggctttcagtgcctggttaatatggtggttgatcgtcacattgcggagatcatacaggttgtcgatgtgaaaatatttttcagctttcgtgatgccttcttccgtcagcagcacactcttcgttttcacatcataagtgtaatctttttctttttccaatgtacgcacaaatgcgttcgcttgtgtatacagtgctgtcgatttttcagcttgtccggaaattataagcggcgtccgcgcttcatcgattaaaatcgagtcgacttcatcaatgaccgcaaaataaagcggccgctgcactttttgttcctggtaaagcaccatattgtcgcgcaaataatcgaagccgaattcattgttcgttccgtatgtgatatctgctgcatatgcggcctgtttttcttcgttcgacatattggttaaattcaggccgacagtaagcccgagaaatttatacagctcgcccatttcctcggcatcccgcttcgccaggtattcgttcaccgtgacgacatggacgcctttcccggacagggcgttcaaataaaccggcatcgtggcggtcagcgttttcccttcaccggttttcatttcggcaatatttccttcatggagcgtaataccgcccatcagctggacatgataaggataaagcccgagcacacgcctggcgccttcccggacaaccgcaaaagcttccacaagcaggtcatcaaggctctcgccgttttggtaacgctgcttaaactcttccgttttgtcgcgcagctgctcatccgacagcctttccatatccgacgccaattcttcaatctggtttgcgatcttctcaagatgtttcagttcacgtttgttggcatcaaaaactttgtccaaaaaagccaccattcaaaacgctcctttatttcagtatcaaaacaggactgtttcggccctatcattgtaattgccatgacttttaaatattaattatagcacagtttcttttctgcgtctctttttccgccgggttttcccggccatgttaaatcagggtttccatgctttttggggaaaattccgatgatacagcccaggatttgccgggtgcgtgtattttgtttcctgaaatataccttattgtattgtaacactgaaacggagcgcatacaacaaaagaacccggagagtatgtgtcaagtttttctcgacaaggtttaaatatcgggtattccaagacactctttttgtacactttcggctaccgtgcttcacttgctcggtgtaattttcggaaaagatgtgatatttccgtataaagatggacaacggggatgttgaggcgcgcgaaattcactcgctttccgcgggcggccggcgagcctcctcgctcgtacctcgctgcggggtctctcctggctcgcttttcccgcaggagtctcgtaaatttcgcgcgcctcaacgatcagtccccactgagccaagcttaaaacgaaagctctaatattctaatattttgcttaaatgtcccattgccgatgaactgcttgaatgcagggcaactgatccgtgctttacgcccactgacgggcgtacaggctgcttgcgcaatcttagaattgttgagaaaaggattggaaaaataactttggctaaagccaaccgaaattcatctcccacctactcattggtgctattcgcaccttcacattccttgaggatgagagacttctttcggaaagccgttaaaatccatgccgggcaaccggtttttaacctccagggagattccggctttcccggttcggcatgcccgggccgctgtctgaaaaaaaatgaagaggcctgagcacccatttggaattggaaaagcgttttaccaggccgccaccatgccgtccgcacgcgattccgtgccgcccatcagtacgcccgtgtccaggttgcgccagatgatctggccgcggccgaaaccgccagtatccgcagccacttggacatcgtgcccttttcggatcagcccttgcacaaggtgattcggaaaatggggttctaccagcacttttttcccctccgtccattgccatctcggggcatcgagcgcctgctgcggatgaagatgaaaatcaatcgtgttcatgatcacttggaagtggccctgcggttgcatatagccgcccatcaccccaaacggcccgaccgcttccccgtcttttgttaaaaagccgggaataatcgtatgatacgtctttttgccgggtttcaatgcattcacatgcgtttcatccaaagaaaaatcatgcccccggttttgcaaagtaattcctgtgcccggaacgacaatgccggagccgaatcccatataattgctttggatataagaaaccatattcccttccccgtccgctgccgccaaatagacagtgccgctctttggcagttcatacggttccggatccagcgccagatccccgatcagcctgcgccggtttgcagcatagccttccgaaagcaagtgtgcaatgtccgccttcatttcaccggcatctgtaatgaacgctttgccgtctgtaaaagcgagtttcattgcttcaatttgtttatgataggtatccacgcagtctttttcacgaaattcaaatccttgcgcaatattgagcgccatcaacgcaacaagcccctgcccgttcggtggcatttcccacacctcatagccccggtagctggcggaaatcggctccacccattcgggatgataagcctccaaatcttccctgcttaaaaagccgccccatttccggatacaggcactgattttttctgcaagcggccccctgtaaaaactttctgctttcgtttccgcaatttcctttaatgccgcggcatgcccgggcgatttccacacttccccgattgccggcgccctgccgtccggcgcaaacgtgtcaaaccatggccggaacatttcttctttaaaaatcgtttgaaactggcggaatgccctttcccagtattttcccaaaaccggcgaaagcgggtacccctcttccgcataccggattgccggttgcacaacgtctgccagcgggagccgcccgaatttttccgatagcgccgcccatgctgccggcgcgcctggcaccgtaatcgggaccaccccataagccggcattttttcatacccttgttttttcacggcctcaatggaaatcgactgcggtgcgggcccgcttgcatttaaaccgtgcagtttcccgcccgcccaaacaatggcgaatgcatctgaaccgatgccgttcgaggccggctccacgaccgttaaggcggcggctgcggcaatagcgccatcaatcgcattgccgcctttttgtaaaacttcaaggccggcctgggcagctagcggctgtgaagtggcaaccattccttttttggcaaaaacggtatttctggtggatacataaggatgatacaagtaatccaggtccatcatctttccccctcgtatagaaatgtctgtccctgcactggcctttcctgcaagcggatgccttgccggctgcccgccccccggttcccagtccgccatccgggcttttctcgcttcctgcttgccttttttcttctctatcctaaacataggcaccggctcattttcacctttctgccggggccgcgtccactgcagcatggcggctcattagacaaaagagccatgtctgccaagggttttgtcccgatagaagctccaattgacaaaaccaccggcgaagcagggcgaattgtctaattaggtcttctatcctgaacataggcaccggatcgttttcacctttctgccggagccgcgttccttgccggctcgcgttgtgtgctaaaaaaccgcccccggcccgctttgctttcaccggataggcccatgctgcaaaagcacccgcggattcaccgcgggtgcttgcttcgccattcccttattttgtttcaatcagcccgtatttgccatctttgcggcggtatacgatgttcgtatgatttgtttccgcatcggtgtaaatgaagaagttgtgacccaaaaggttcatttgcagcactgcttcttcactgtccatcggttttaagttaaaatgtttggtccgcacaatttgcagttctgagtcttcttctttcctggcttgtttttctttcagtacagcgtccggagtgaacagttccctcgtgcttcctttttcacgcagtttccggtttacttttgttttatgtttgcggatttgccgctccaatttgtcagcaatccggtcaattgccgcgtacatatcctcattggtttcttccgcgcgcaatacgagctgcggcattggaattgtaatttccactttggaagttttatccggattgactttaagttttacattgacggaagtgtctggcgtttctacgaaataccgatccaacttgttcacttttttctcaacataatcccgaatcgccggagttacctcaatgttttcgccacgaatgttgtagttcttcatgtggacccctcctcatcaactggcagccccttgcataccgcggtatgctcgtactttcactttaagcggtaaaagcgctgccttctctaataatcttacactattcactatatatttgcacatttcctgtctaaattccttcttttttggtgaatttttcttagaaatatttgtcatccccctgtttccgctgtaaaaagcagccatcatgccggtttacacggcctttcccgaaaaaaagaagttctgcatcgatcagaacttctatctttttcggtcataaaaccttccatcatttaactgcagggactggtacggatttatatactgcttcatggacgttttctttttcgcagcttgctgaatatcgttccggatgccggacagcgttttctgcatcaggggcttcaattgtttgtcaagatccatgatttttcttccaagccattgcgcttcagcggaaaaaggcggtttcatggcagcaagcagcgccccgcgccggtcgaggagccggtggacgttttggatcaaggtttccctcggctgttctttatgaaattccgaaagcagcgcttccgtcagctccaggcaggcggcaagatcgcccatcatactttgccgccctgcccgtatgtttgccggcggtttgcctggatgacctgcttccaggtgtcgcggaaacccgttaccaactcttccgctgtatcgagttttgacatatcatttttcacattggcctggatcagttcgcgcaggataaaatcgtaaagggaaagcatcttttctgcatcttcaaatttgcccgtatcgagcgtcatcatcaattcgcggatgatgttttgcgctttttggatattttgatttttttcttcaaaatttttgttttcaatggcttttttcgccaaatggataaatttcaggcagccattgtacagcatcaatgtcagctcacccggcgatgcggttgcaatcgagttgttctggtacgcctggtatggattacgtgttgccatttgcggcccctcctttaactattgctgaaaaagctggatagataagtatattggctgttgtatttttggattgcttgctccatcgctgtaaactgcgcataataacggtcttcaagcttgcccagtttgtcgttcatgtcactgattttatccgtcaaatcgttgatgtttttcccgatcgtgaactgggtgttcacataagtggatttcccggctttgtcaacgatcgtgttataagtattattgacgctgtcgtacagcctttggacaatgcctttttccgatgttgtgctgccggtcgcgcgaaacagcagttcaaccgaatccggatcgttttggatcgcggccttcagcttgtcttcattaatttctagcttgccgcctttaagccagtcggaagtcgttgtgatgccgatgcttgatagctggttgtattcggatgaaatattggcgttatttacttttgaataaatcaatgaccgcatgttcgacaaggaacttttcagcgtcatatcattccttaaaaggccgcttctcgcttttttatcccattggtcctgctgcgtgttcgtcaattccttgcgttggtcgtccgtaagcggcgcataatccgggtagcggtcttcattcagcttcgactgcacggcatcaatcaggctgttatactggtccacaaaatttttgatgttgttgtagatggtgtccacgtcgttggaaaccgagatggtgaccggcgagtcgaattcgctttttaacgtataggtgacgccgctgatggtgaaggtgtttgatgtccgttcggtatccaacccatttatgttgaacacggcattcgtaccaccgtattcagtgctgccgctaaattttaatgtatcccgcaaaaaatcgtaagtatctgtatcagaagaaataatgatttctttaccatccacagatgaagacgaattaaaattaccggtctcttttctcgtcagcgtaaacatatctttatattcgtcataatacattgtcaaacctaagtttgaattgttcactttagaaatgacatcatttaacgttttatccgcgccgatataaaaattgccgttcaccagcccgcttgaagtatacgtttttaagttaaaagaagtgtaattttgctggtagctgatttggatagcagaaccgctataaattgacccgaaatcgctattaaaatcaatttttcccgtttccggattaagggtgccgatctgggtcgaaccaatgaataaattcatatttccgtccgtgccttgggagagtgagacgttattgtttccaactgtcatagtaaatgaatcggtgataatgtccccaaagtccaattgtattgatttcgtatcagacgagacggttgcactttttgttgctttatccaccacgtattcaacactaatgctcgtcccggcggaaatatttgaattaaattttaatgttgcctgcccgccagcagttgtaagtaaaacctggttatcactgagcgtaacggacggatctgtcaccacttcataagtttttccgttcatttttacattcattggcatattactgttaagtgtgccctttaagtcaaacgtaacagacgttggatctgtggagtcccctttggctgttatggtatccgatattactcccccttggctccattcgattgacccgctgaaatttcctgactgtttccataaggattgattcaaatcaaccttattggatgaatctgttgaaattggggctttggctaccctcgtcgctgccgtcgccaattgttttacactttgaattgtcgttgaccccagcgatgcattattcgccgctgttgccgttacatagctttcatttgatgaagtcgtcgtgcgtgccctgtacttggaagtcaatttcatgttggacagcgtggagcggaagtcaaaatatttttggttcagcgtccggtagtcttcttcctgccactccaaaatttgcttttgctgctgcagtttgaccaaaggctgttttgccgcggtcatcattttttcgacaatggaatcgatgtccatgccgctcgcaagccctgtaattctttgtatggatgacattctatcccctcctttataccttttcatcagccagaatcccgacatggtgcagcatatcggcatacgtatccaaaatcctcttcggcggaatttctttaatcacctggtccgtcttgtcgtcgataatcgtaacataatattcttttagctggtcatgaaattgaaattttaaatgggtggaggatccggacaggaaatggttcagctggtccaccgcttttttcactttttctttcgtttcttcattggcgggaaggatttgttccctggtttgttttgtcacaattggcctggcctgatccgccccggttgccttttgtgcctgcggtgtactggttgcaagaggcggatgcgcagcctgccactgcgtcgctccaatcatagcaagttctccttatgttccggcgttcccgccatgccttgtttcatggcggaacaaaaccgcttttttgtctactatttgtatcggatgtttccaaccgtttttaacatccgccgctttaaaatttcactttggcgaatgccttacctgaagccggaggggttttttcagaggtgtccatgccggaacgggtgaagcagtgcaaatttttgggataaaaggcaaatacccatacaggcaccgggtttttcacatatgctttatcgtcaaaaaataatggggttgaggaggaaaaaactttgaatacaggttatcaagaagttccttattatgaaacatttaaccatgaagatgtaagattgcccccatggggatttggaggcttcggattcaggccatggggttttaggccgtggggattcaggccatggggattcggttttgacccgttcctcggagggtttgcaggcggcctggcaacatcggcattgctcgcacctgcgctttacggcggctacggcttcccgtacggcggctacggctatttctggtagtccgacgcaagaagccggcctttaagccgatttcaactttgcgccggcctcccgtttaagaaatagagtagcggatcatttgctggttttaataagcgatggtcgttggacacaaggcgtaaagattccgttttcatataatcgcccggaaccggctaaatgccggtgttttttctctttggcactttcttcacgcaccgcctttgccgtttacgcccgcctcgatacataacggttttcttttatccagaaccggtacgggtaatgtttggcttcaccggtgttatcgattccgatgcgcgggccggtttcgatttgttccggttcgtaaccttccgcaataaagagcgggcgttcgtaaaatacgcgcccgtagtcttccattgtaatgcctaatgcttttgttaacttcccgggaccgtttgtgagttgctttgcttccttgactttccggcgggcaaacatcagctccgttccaataaaaggttccacggcacggatcaggatggcttccggtgtgccttcccggccgctgacgacattcacgaggcagtgggtgtgcatttggtatgtatacacgtggcccgggccatagtacatgatttccgttcttttcgtccgccggtttccataactgtgcgcggccctgtcccatgcacccatgtatgcttccgtttcggcaataaaaccggccgccgttccttcttccgtctctttgacgagcaggcaaccgagaagggcacgcgccagctccagcgtatcttttttaaaaaaagccgccggcaaaggcataagcggggcttttctcacatgaatgcctcctttctatatggggcgctactttccgtacattaatgatacccggcaaagggcactttaactcctttctccatatcatatggtatccggccaaaagcatctttccgtgcaataaaggatctttcacgcgcttaaacatgcggcagcggtttcaccgagcacaaacgaaaaccggagtgaactctcttcccatgcaatgaacgattgatatcccgaacgcttcgaaaaccccttcttcccatccatgcaaaaacagctttccatccggcaatggttccttcgtatttttaaacatgccttgcacgataacggttacgctgctgcgattgcggaatccggaaccagacgcatctttccatccagcaatggttccttcgttgtgaactacccaccacttatcaaccttacggtttgattgaagtgggggcttctcgacttatcgttgcttttactagccaacgaaaactgaccgagctaaccctcttgttccaagagttttgttacttatgataacgcgaataagcgtaatccctcatttttgatnnnnnnnnnnnnnnnnnnnnnnnnnnnnnnnnnnnnnnnnnnnnnnnnnnnnnnnnnnnnnnnnnnnnnnnnnnnnnnnnnnnnnnnnnnnnnnnnnnnngaggatgggagacttctttcagaaagccgttaaaacctatacacctttcccttacgataaaccggaatggaaaaatgttttccattcaaagctttctttgcacattcaaaaatggagcttccctgccgcgataacggttacgttacagcagttaccggagccggggaaaaggcagccatctccagtttagttataacgattgatatccctttttccgctttgttccaggcgcacgactaatgctgtcaaaatgtatttcacataagccagcacgctcgaacggcgctcgcggatgatgttaagctggtggataaaatcgagtatactttccctgctcatattgcggacaagcaaatcgattgcctgctcgattgtcaattcccggtacctgtctttgcttgtctgcacttcaattgattcaaacgaatgcatgaaagagtggagaattcctctgatctgattctcactcaacggaattttttttaaatctccacttgatgttttgctcaatttcaaactcaaatcctttctacacgacgatgcagatgccgggctgcacgctctgtatcttttttgcattgccacagcagcgcccccttccccctttatgcaatacggatttgaaacgatgaaaaacgggatgatgaaaatttttcacatttgcctgctttattattataactgcaaaggaaggaaccattatagagcgtaaaacggaaatgatcctttcagactagttcttgccgaaaaattataataaaggcgggctctctttgcccgccagattacattattgtttcgtttcttttacagattcatacattttttgaaaacgggcttccacttttgcaaaaatggtgccgtccgggaagtggccgccggaagtgcgttctgctcccgcgttttcgccggttaaaatttcaatcccttccgaaatatggcggacggcccatatgtggaattggccggctttcacggcatccacgacttcatcatgcagcatcaaattgcaaacgttttgctgcggaataatgacgccctggcaccctgtcagcccgcggtctttgcagatggcgaaaaagccttctattttttcatttacaccgccgatcggctggatctcgccccactggttcactgaaccggtaacggcaatcccctgtttgatcggcatgccggcaagcgatgaaagaagcacatacaattcggtactggaggcgctgtcaccgtcaataagcgaataggtctgttcaaacgtgaggctcgccgaaagcgggatcggcttgtttttggcaaacatgccggataaaaacccggttaaaatgagcagccctttattatgaatctgcccgcttaaagaagtttcccgttcaatgttcataatgccgctttttccgacaaacgtttgcgccgtgatttttgtcggaatgccgaatgtcgcatcccttgtccccatcacagccaggccgttaatttggcctacccgttcgccgtccgtatccaccataatcgtcccgttatggatcatttcgcggtattgttcggaaatatggttcgtccggtttgcctgctcttccagcgctttgcggatatgatggctgtctacgcaggcgcttccttcttttttcgcgcagtaacctgattcgacgagaatttttgtcagttcctggaagcgcgcagtcagtttctcctgttccccggcaaggcgcgcactgtggtcaatgactttcgcaacggcgcgccggtggaacgggagaaggtttttccgatctgcataatttttgataaaataagccattttcctgcggttttccgcatcccgcttcatcaccgtgtcaaactcgactttcactttaaacagcttatggaaatcttcatccacgcttgataacaaatcgtataaatagtaagacccgataatgatcactttgatattgagcgggacaggctcaggcttaaggccgctcgtcgggaaagcgcctctttcagcaaacgggtcttcaatctggatttcccccgtttgcaacgcgcgttttaaaagggtccatgcatacggctgcgacagcagttcggcagcctgcaaaattaaatagcccccgttcgccatatggattgcgcccggtttaacgagcgtgaaattggtcgtccagctgccgaacgcgccgcggtactcgattttcccgaataagttttggtatgtcgggttcgtttcatagatgacaggcgcgccctggccgtttttatggctgacaaggagattgacggcatagcgctggagctgctgctctttgctgccggtcagcgcctggacgacggcgtttccttcttcctggtcggttaaaaacaacgaaaaatgctcgacaatatcatggttgtattcctcgagatagcggaggacttttggaaaatcgcggtaagcttcttttagcggctggaacaggccttcaatggtaaaagcagctgtctctttatgaaaacggtcgagatttttccggagctgttcttcaatcttccggatctggtacaccgtttcattgattttttcctcaagctgtttttcccgttctttcaatttttctttgttggcatcggaaagccgctcgtattcttctttttccatcggccggccgaaaaaaagcggaatggtttgaatgccggccggggtccgctccaatttaaaattcagcccggacgcgaacatttccgtttctctccaaagtgcctcgacctggttttgcgacgcgtcaatgatattccgcttcttcttttccgtttcttcatttgaaaaagtggcgcggagttcccgttcaatatcaatcaaaagggtttccatcttgcgctgaaaacggaggccgcttccagccggcaaattgatgacaagcggccggtccggattttcaaaattgttgacatagcaccaatcatccggcaccggccgtccggatgcgagcttttcgacactatgttgcgtatacgtcattctgcccgtcccggacggcccgacgacgaataaattgtaaccggactgctcgacagacaaaccgaaatccatcgcctgttccgcccgctgttgcccgatcatttcattcggcagcgtttctaaatcatctgtcgtttcaaacggaaactcgtccgggttgcattccgaacgtaatgatgagacaggtacacggtgtacggataaaaccgtttcgtattcttcccgattcattgcaatccctcccaatatgggcaatgccctctccgtaagatttcgacatttttgtcggaattcctgcaaaatggcggcatgtcaaaaagtgaacatttttaaaacggaatctgttgtgatcatttttctccggcatttcaccaggtgacaggaaaaatctgttttttcccaaagcaggaacatcctgaaaaagattttttggcattctatagcagcacatccagagcgaaaatttgcagagggaaaacgcgcaaacattgcgaagaacccgggcatttcgcggcaggaaaaacgcagagcagccgcaatcttccaggaccaaatatcgaaacacgaaaaactgctccggttccatgcggagcagttcactgcagagcttagtaatctttcacaggcgcttccctgagtggcgtgttcttcgcgcgcactttcggggcaactgcgatttggtagtatacaagcagaaagacgagccagagaaccccggcgaaaacggagatacgcgttaacggtgaaatggcaattgcgataaaagccaaaagaagcatggccagcccggcaatcggcaaaaccggccagaacggcattttgtaatgaaaacttgcgcctttgtctttggatgcggcccggttcacaatctccagcacgaggatcagtgcccagataaaaatagccgaaaaagcggaagcactcgtaatccaaacatagacagtatccggcgcaatatacgtcatgatggtcccaaccgacatggccacagcagttgcaaacacgccggcgtacggaatccgctgtttgttgagtttgttgagggaacgcgggagcaatccttcattcgccatactgtaaagctgccggctgccaccgtaaacgccggtattgcacgatgagagcccggagaaaataatgatcaggttcatcaacgccgccgcaaccggaatgccgacttgcgagaaaagaagaacatacgggctgccgtcatgcccggccagttgcgtccacggatacgcgcacagcatgatcaaaatggatccgatatagaaaaaggaaatccggtatgtaacacttctgaatgctttcggcatcgactggcgcgggttgtccgattcgcctgcctccacggcgagcgtttcaatgccggcgtatccctgaatcacaatcgcaaccgcctggaaaacgccgaaccacccggccgggaaaaacccgccgtgcgcccaaaggttcgaaaagccaacgatttttccaccattaaataaaccggtaaaaatcatcagcgcaccgaaaaccataaaggcgagaattgcaaagacttttaaaatcgcaaacacaaactcaatctcgccaaaaatttttacagccagtaaattagaaactgtgaataaaatgagtgccaaaaatcctggaatccaggccgggaaatgcggaaaccaaaactggaccagctttccgatcgcggcaagctccgacatcacagtcgccacccataaaaaccaccacatgccgcctgaaacaaagcccatccgctcgccgaacaaatcatgcgcatacttgctgaatgatccggcaaccggtttttcaaccgtcatttccccgagcgctcgcatgacaatggcgacaaccaggccggccgcaatatacgccgccaaaacacccggtcccgccattttcactgcctgcgaagcgccgtaaaacagcccaacgccgatgacgccgcctaatgccaaaaactgaatatgccggtttttcagcgaccggcttaaatgattgccctgttttctgtcattctccatccttccaactccattcgctttttttgtctgcataccctttgtccactcgttataaacaaaacgggccgatgtttcagcttccgacccccggggtatactaacggaaaaaaggaagtgaaaccatgtccgataaacagttgaagaatgaagaagaaaatgaaaagaagaaaacgaagaagctggctgacaaaacactgacggacgggacaatggacaggaaggaaaagaaggaggagtaaaatctgaactgataaaaaattttgttttttgtattgacagcctagcctaaatcttgtataaataatttaacaacaaaaaacgtataatctctatggctggagacgatgagaagccatagccaaaaacatgacaaatgtttttttggctatggcttttatttttcggcaggattatacggaaaagaaagggagagaaaaatgagttttgagcatttagactcgccacagttaaagcgcttccaaaggaaagtcacacttttgtctgccggcggtacttttttggatggctttgatttaacggtaattgctgttgccatgccgctgatccttgatcactgggaattcgggccgggcatgcagggactgattacttcctcagctgtcattggctcttttatcggagcaatctggctgggaaatttaacagataagtatggacggaaagccatgtacgtggttgatttgttggcatttgtcgtttttgcgacacttacggcgtttgcccaggcaccttggcaactggccctcttcagatttttacttggtatagggatcggggcagactatccgatttccgctacgcttgtatccgaattcagtgcgacgcaaagccggggaaggcacagtacatcactcggcgccatgtggtttgtcggagcggttgttgcctatctggttggcatactgcttgtcccgctcggcgaaaatgcgtggcgttacatgttacttactggcgccatttttgctctcattgtcttctttttccgtgtaacgcttccggaatcaccacgatggcttactgcaagggggcgtgaaaaagaagcagaagaaatcatgctgaaaattaccggacagaaagtcaaaattcagccaaatatgaagccaaaacaaaagattagcagccttttcacgaaagtacttttccgtcgcactttctttgtttgcggattctggttttgctatgccgttgcctattacggaatttccatgtatacaccgaccattctaaaaccatttactcacggatcgcaaatgatggtatatattggttccggaacggttagtttgttgggattaatcggagcaattatcgggatgaatttggttgaaagaattggcagaaggccgttgatcattacttcttttaccggcttatccattgcattaatcattttagcactgaacccttctccgacaatggcttttcttgtcatcttattcagttttgccgtactatttgccaacatgggtggcggcattcttaattttgtatatccaactgagttatttccaaccggcattcgtgcaagcgcttccggattggcaactgccgtcagccggattggttcaatcatgggcattttggtattcccaaaccttgttgtggcatggggtaacagcaaagccctctggttttttgccgccgccggattgctgggacttcttatctcggctattttagcaccggaaacaaaagggaaaaacctcgaacttattaatcaggaatttgatgaaaaaaatgctgaagcaggaggtaaaaatggaaacttggcttagtatatggtcaatcgggcaggagagcacgctggatgattttaaaatacttcaaaaggccggctttgacggcgttgaaatttgggcagagcatttacgggcaaaagaaacctttgaatatgcccggcaaactggcttaagaacgagcattcatcttccattccatgatttgaacattgccacgccggacacgattatctatgaaagggcgtttcatgtattaaatgaatggatggatattttagcgggatacggaggcagccatgccgttttgcacggtggctatgcctggtcctctgaagaacgtgatgaaacgctgtgtcgtgttcaaagccggctcatgaaattaaatgaagcggcacaaaagcgggggatcgtgttgttgcttgaaaatctaatccctgaccggttaaattactgccaccatgttgcttctagcttagaagagtggaccggcctgcttcaagcctgtaatttgaaggcatgcctggacacgggacacctggcgatcatgggaaatgaactggaagagactgtaaaacagcttggtgaattgttgggagagatacatgtatcagaaaatgacggaaaagcggatttgcatttgctgccgggggaagggaaccattatacagaaaaactgattgatattttgacaaagtatcagtttacagggccagttgtattcgaaattaatccttatcaatatactctaaaaaatatagcaaataatatggcaaagtttagagaaaagcaaaaataacatgggcagagactttagagacccccagctgataataaacctctccaaggtttattaaactgggggatttttcttttattgggagggaaggcaattgaaaaagggatttatttttgatttggacggaaccatttatctcgataaccaattgataaaagggagtgccgaaacgattgactacttgcggaatcggggacaccatgttgtattttttaccaataaatccattgccaccagaactgattacgtaaaaaaattgaaccagcttgggattcgtacttcaattgaagatattatcaattcaaactatgtgactgcaagatttttaaaggaaaaaatgaatccattagagcttgcctacgtgatcggagaaaaagctttgtatgatgaattagaaaaagaaggaattttaattacagaagatgctaatcttgcaaactatattgtcctggggtgggatcgccagtttacttatgaaaaactgaagcaggcatacatggcatggcgaaagaatcatgctttgatcattgccaccaatcctgaccgcacatgtcctactgcagaaggaccggttccggactgcggtgcattaattggagcatttgaaggcgtgaccggcatcaaaattgaccatattatgggaaagccctcgagatttgcggcagatcttattgttaaccatatattaaagctgaagcctgaacaatgctatattgttggtgaccgtctcgaaaccgacattcatatgggaaatgtttacggcttacataccattttggttttaacagggatcagcacgcagcaaacgatcaaaacaacagggatacaacctgagtacactctcgaaagtgtaaaagaaatgatgcaaatatccgagattattaactgtgaagcagatgttttttgcaagaaaaaagtgcagagtattgcagtatataaattcgtttataccgcataaaaattcaatctgaattctcgctattaagggcttgacatggagcctctgcagccatgattcttttgccaagcggccagctgtaacagatttggcaaacccaaacaggttatcatggctacccctccatgtaaagcccctctgcataaccatttgcatagaaattttgcacatctctgcactttaattttgcaataaacagcagaaaaacgaggtgctttgcatgattgatttttttcagtttgacattgaaatgctcctaaaactcgtcatgtcttccatacttggattggcaattggacttgaacgggaaataaaaagaaaaccgctcggattaaaaacaagtcttgtaatttcaattgtcagctgtttattgacaattgtttccatccagtctgcttattcgtttcctcaatccgattttgtccgtattcaaatggatcctttaaggctcgctgcccagattgtttccggaatcggatttcttggggcgggtgtaatattacggaaagaagatgataccatttccggtttaacaacggctgccatggtttggggggcagccggtattggaattgccaccggtgcaggcttttatatggaagcaattgcaggggtcgtactgctaatcattagcgtggaaatcattccgggattgatgaaaaaaattggttttgaaaaactgtacgcaaaagagatttctctcaatcttatcttacaggagagtcgtgatatacaaaaggtcattcgttccttagaaaaacaagatatgaaaatcatccaaacccatattaaagatctggatcatgcagcataccagcttgagttaaaaataaaagtcagagaaaaaacgagcattgcttttctttacagtgaaattatccaaatgaacgaaatcaaacggtcggaaatcagcgggtgaaaaaagaaacggcacaaaaggccgtttcttttttatcaaattaaatatcaaaattccaaagtgaaggatcccctgttgaaatggccagtgcacctgcctctaatccttgcaaaatattctcttttgattcaattaaaccaccggcaataatcggaaattttacctttcttgtcagctggtcaattatgttgggcatcagaccagggagcacttcaatggcgtcaggactacaggttttactcgtgtcaattcccttctggacagcagatttatcaattagaaagatccgctgaatggtcatcagtttttcatcttttgcatatttaattaaagaatgtttagtggtaataatcccggttggcttccatttttgagcgataaatttgacagcactccttgcattggacaacccttcaataaagtccatatgtataaaaatatgctttccggcctttcttaactgttcaagatactctgatgtattcagcaaatcccctgttaagagaaatacaatattagcccggctcaaagctgctttttcaatatcctcttcttttttcactgaagcaatgacctgcgattgaacaagatcaacaatattcaaaataattaccccctttttgtaatcatgctacatctacttattcttttaaccttactggaattccttcataaaaaactctccttcagccgtcaatagaaagtggattggcaagtacttcttgctccgttgtgttcaatggtttaaaatttggcggattcccattcgttatttcagcaaatggcaaagcgtctttttcacgtggccataaaaagaggaaagcatgttcgacccaatcctttcctctcatttctattttttcttccggcctttgtcataggtgatcaccatttcggatttcttttttcttctattctttaagcctctccctctttcccactctttgatttcgtgaatacttcctgctcattcatcgcccatttctccagttcctgcaaaatgtccgtgccaatcgtctttttccggtaatctgcagcagaaagcatcatcagccacggataggctgataggctgccggcggtatcgcttttatccttcgtctatattgttcccacgttgacctgaactttgtccaaatcaaatgtatggaattccaaatgcgggctccaagtgaatgtccagtttcttcattctaacatcggaatctgctccgccggtcaaaagtgccggaaatggaatatcaaatataaaaaggaggccctggaaaaggcctccttggctaaacctaaaattaacgcaacaattgcaatacttgctgtggctgctggttggcttgagccagcatcgcttgtgctgcttgggcaaggatcgattgcttcgtttgttcagacatttctttcgccatcgtgcgaacatttgctttcacaaatgacaagactatatcttcatcctccagctttctgaaggagccgggcacttcggattggcaatgttgaacggcattacctcacctacggatttcatcgccatagcatttgctttaggcggtctatcctagtcgttgaaccttctccactctttcgagacaggagctcggctgctgattgcccaatcttttcttttttcaaaccctcacgcctgccgtttccagcttcgttgtggcaagaaaagctctcagggttttccagcaattcacccggtgataatctctaaccgttgccagttaggacgactgtgcttgtcactgcttacgcagctaaagcataatcaacgtcacgaatacgtgattcagcagaagttaagttttctgaagatgtgcttaggttgttgattgtatgttccaaacggttttgataagcaccaagtttagaacgttcagcagatactctatcaattgcattttgaattacagttactgcattaccagcattttctgcattacttacatctaaagcattttcggcaaggttattgtttgttccgtcggttactgttgcagaactagtaaatccactacctatacctgtaataccaagagctgctgcacgcatatctgaaaattcaagtgtcattgtttggtccttattagcaccaatttgagtaataaatgaagatgtagcagatgtagcagttgggttagttgtaccagctgtcaaaccaataccagtaccgctaacattactaattgtaatagcgtcagtagcattctcagcagtaagtgttaatttgttaccatctttaccaactttgactcctgatacgctagccttacttaatgcatcacttactgcacttactagattatcgatattgcttgcggaagtactactccccccaactgttaccgatacagctttacctgaaccaaccttaatatcaaatttagcttctttatcagaacttaaatctactggtgaagtaaagtctactgccgatccagttaccttcgctggtgtagtagtagcaggagtaacatgaccagctgtaccatttaatagcttttgagtattaaactctgttgtgttaccgatacggttaatttcagatgttaattggttcatttccttttggatttcagcacggtcatctgtagtattcgtatcgttaccagcttgcacagctaattcacgcatacgttgaagaatatcatgagtttcatttaacgcaccttcagcagtttgaatcatagagattgaatcttgagcatttttccctgcttgatccaacccacgaatttgtccacgcattttttcagaaattgctagacctgctgcatcatctgcagcactgttaatacgaagccctgaagacagtttttgcatggcttttgattgcgcgttggttgcagcatttaagtggttcaacgtgttcaacgctgcaatgttgtgattgataatcatctatgtttcctccttgaatgttgtgcacccacatccttgtgggcggaattttttaacggggttcgaggtcggccgccctgttcccccgctcactctttatatcggatggggaaacatttgatttaatagttttaaagaaattttttcgtgcggattggtttttgagggactgggaagtgcggatactgttgtcttggggaggatttcccgttgtgtgcagtaacaggttcaaaaatatactggggcctgttgctgcctgccgcccgcagcatttcttatatttttccccgcttccgcacgagcatgcctgcactaaaatttgcccacccgtttttcaagccagattccctccaaaaaagcccggcaccgtattgaaaatcaaaaaagtaccgctaaccaatgtgtccccggactttttttaactgcccatatcacgcgcccccgctgcctttcttggattgggcaagcagatggagcaggccttcgatattttttgcggcgttcgcgttttctttctgtatctccaaatacacttctttccggtgaatttcaacatgtttcggggcgttgatgccgattttgacctggtcgccgtggatcgcggcgatggtgatttcaatgtcatcgccgatttggattgactcgccttttttccgcgataaaatcagcatcttctcaccccttttccttgcccgacccgtccgcaaagagcggatgccttgtgtggtaatgccggtcgtttaaaatcagttgtttccccttatggttcttttcgttcataataagcggcgcctgcaaattggctgttgtttccgaaaacggatcacggaccgtcaaaatggcataaacccgcacatcttcctctttttcaatcgacagctgttcaagcgtggcatcgtcaatgttaaatgcataatcccggaaaaacaaaaacgggcttgtgacgacaaaagcgacatagggggacgccgttgactggaggaccatataaataccgtcgtccaaaagtggcagcaacacaaaggatttctcatccggaaatcccggaatcccgccttcaaaaagccatatatctgcatcctctatttccactttgccgtggtattttgtttgaagcttcatcatgttttgcgaggggtccccggctttggctgccggggaaaaccgccttctctcctttcgatgggcatattgttttgcgctttctaaaaatcttgcagcgccagcattttcctgctcctaaccgtcgttccggtcctgccccgcccggtttgaaatttataaagataaaaaaaacggcaccacccggcaaagcaggttggtgtccccgtattatttcaaaaagtcgagcaatgtcggctggatcacttgtgcgccgacttttaacgcagcaatataggcgccggatgcaacggaaaagtccgtgtacgccttgtcgacatccacatcttcgttgccggccatgatcttcgttgccgttatttcctgctgggtgacgcggtctttcatcaaatcaaggcggttgctccgcgccccggcctgcgacagttcgctcagcacgttgtcaatatggccgtcaattttgtccaaatagctgccaaagccgcttgccgatgtaccggattttaaatcgctgattaaatggttcaagtctttaaatagatcatcggaaaaagcattcgctccgttcgcattgacttgcagataaatgccttttgacagttcaatttttaccggattggtgtgaatgccgaggctggttgagccgtcaaacgtgctgatatcgccactgatcggtttctccgtcgtacttgtgccgttaaaaatatatttgtccttgactttcgtgttggcaatattgacaagctggtcgcggagctgttccacttcatcggcgatcgactgccggtcagtcggagtctgcgtgtccgttgccccttccactgtcagttcccggacccgctgcagcacctggttggcttcatcaagggcgtcatttgtcgattcaatccaggtgctggcttccgcgaagttgtcttcgtattgtttcacctgggcgacggttctccggtaggaaatgcctttcatcgcggacagcggatcatccgagagtttgttgatctttttgccggaagacagctgttcctggtattttgcgagtttactgtagcttgtgtttaaattgttcaaaaaattattggcgagcatcgactgggttacacgcatcgtttttcacctgcctatctgcctacaacgcccatgccgttgatgattttatcgagcatttcgtctgtcatggtgatcatctttgctgcagcattataggcttgttggtatttgatcatattggttaactcctcatcaagcgataccgagctgacggacttccggttcatatcgaccgagtccaaaagggaaccggtatttttctgcatattgcctgcctgttcggcatccaccccgagttttccgatgatgccttcgtaattgctggtgatggtgccggatgcaagcggcaggccgagtgccgcgatgttaagcccgccactgatcccttcaagctgcacattttggctgcttaaatgaaaggtatccacatttgaaaggttaatggcattcagcccgtcgccggaatcgccgtttgaagaggcggcgattttgttgtatgtaaggctgctgttgacggcaatttggcccgcggcccctttgtagcccgttaaggcgccgaacgtaaaaaaggcagtcccggcgttcccgttgaggtctgtccctttttcgtggacagcattaaatacgtttccgaacgtgtaggcgagtttgtccaggctgtcgagcaaacccggataagcccctgcttccactgtgccgtttgcgccggtatactggtaaccgtagctttcaatcagccccaaaagtttgccttgcgggaatgtgaccgtgccggttgcatccgcgatcgcaaaattttttccgccgattgtgatgccggctatctccccgtttgccggcggcccgtcgaggatgccgtcgctgttgctgtcggtgcccccttgcacttcgactgcattgtaatttgaaccttggacaaggtatacgcttgtgccgtccgcagcagccattttaatgttgtaaatgccgtccgcatttgcttttgcatttccaccgcttttttggacttcgacggttacgttcaaataattggacaacttatcaacaaggctgtcccgcttgtcatacaagtcgtttggcaaataaccgttcggctccaggacagcgatctgttggtttaagtcgctgatctgttttaaagtggaattgatatcgttgaccgatacgctgatttcgctgccaacatccgttttgtactgggaaagcgtgctgtttaaatagtggaacgtatccgtcagcgtctgcccgcgttccaaaacaaccgatcgggcagatacgtcttccgggttcgtgcttaagtcctgcagggattcccaaaatgcttccattgtgttggccaaactgctgtccgtactggtttcgtccatgacggcttccattttgcttaatgcatctgatttggcggaccagtaaccggctgcactgttgttttcccggtattggacatcgagatacttgtcgcggatccgctgcacttcgcccgcttccacccctgtcccgagctgtccggcgatggccgggcggttcatcgaagcagcggggtaggggtctgtcgcctgcaagtttacccgctgccttgtgtagccgtcggtattggcattagccacgttctgcccgacggtgtacagggcattctgttgggccgttaaagcccgctttgctgtttctaatccaaagaaagtggacaccttgctcctcctccgtattgtttcaggcccttgagtcaaaccgtggcatggcggccgtcgctttttgcccggacggcggcccgtatgtggcgggttcatttttcggataaatcagatccagcatgaattgggtaaattgaagggaatgataaaggagcatctggttcagctcattttgctctttcagcttccttgtgatgccaatcaggcttcccctcaacgtttccagccgggaccgtgcttccccggtcgccgccgcgatgcagtccgacagtgtcccgttgccgccggtaagcgcctttgccagcgtttcccgttcctgttcaagtgcgccgattgcacggatatgggcctgttcatcccggacgatcttttgcagttgtccgatatcctgctttttcagcgcttcggttttttcggcgccaaggacgaacaggctttcatggagcttctgcaatttttcaaggcataggatcaatttttccgcagacatttacgccactccttacttgcctgtaaaatatttcaatatgccttcagcggttttttccgcatccggctgataggttccgtgctgtacctgttgttttaaagcctcaattttccggctccgttcctgctcaagtcgggacgttttttgcagctgtttggcttctgaagaaatttccactttatccgttttccgggtgctggaggcggtttgccgcacatcccgctttgtctgctgctgatacggattgattcctgaagtattgaccggattgattttcattcagctcacccctttttcaaacggtctccgttccattatgtttattatatcggataaagctgcgcaatgtttacttgatgtgataagtcttttttcttatttctttctgccgtttcttttctttttcaaaacgttcgagaccttttgcaatcgtttttgcacattcttcgcataactttccggactggatcaatttgccgcaacggtcgcaaggatatgccagatttggaaaatgcgcaatcaaaagccggccgttccgcacccatttgaaaaccagcttttccggaacatggtttttttcaacgattgtctcgatcgttgccgcacggttttcgcgtttccgcaagaattgaaaaacccgttcaaatgcggcctcttcctcgcgatagcagtcttcgcacacatcgcggacgggatttttaacatataattttccgcaattcgggcagtttgccaactccgccattcggcccgcctcctttttccggcacattgtcttctatcttttatatcggcagaaatcccgttgagtttaacttcttgccgcggttaacgatacaattttccgggcgcccgcttcacgcaacacttttgctgcatggcggacggtcgaacccgtcgtataaatatcatccaccagtaaaacggaacggccttcgattgaaatgtctttttccatataaaaagtttgggcctgatggatgcggccagcccgtgtttttttcgattgtttttcagcatggacgcggtgaagaatgtttgccgtttcgaacccggcggcacgggcgagcgcctccgcctggttaaaaagccgctcggaaaggcgctccgggctgagcgggaccggcacgatgcagtcaaatgcgcgggacttgagggcctctttgatgccgtccgcaaaaatggcggcgagcgcataatctccgcgaaatttgaaacgggtaaaaatgtctttgcaaaaatcgttgtacgtataagacgaaatgttttcatccagcacgcccgcccattctgggtcttgttcccatctggcgcagtcaaggcacagatccccctcccgataagaagcatccagcctggcaaggggccgggaacatttcgggcagacgggcggtgcaattttttcaagctgcgcgcggcagtcttcgcaaagaagcggcccgggctgcggaaaaatcagattgtgccaggacagtttacgggtaagcggctggtggcagaacaggcaatattcatgcatcgagcaacccccgctttcccgcttcttcattcatggagagaatatggcgctgtgctttcaccatcgcatttgattttccataatggaagaacgtaacatccccatttgggaaatcggcgcttctcccagcccggcccgcgatctggacgagggcggcttccgtaaaaatggcatcttccgccccgacgacacagacatcaatgtccgggaacgtgacgccgcgttcaagaatggtcgtcgtcagcaaaagcggcgtttcgcgggcgcgcatcttttccactttttctttccgttccgggtcttctgcgtgcaccgattcaatcgacggatgcagttgtttaaaaaccggttctgcttttttcatgaggcgaatgttcgggagaaaaagaagcgcctgttttccggtttcaagtctcttttttacccatgcttcaactggaaccgggagctgtcctttttcaaactttctccgccagttgcctgcccatttgaatataggaacggggaggggcttgcggtggtaacgggccgggatcgtgacaaacgggcgcttgcctgccttgcattcaagttgccatgtttcacccggcgttgcggtaagataaatgcgggcgcacctatcttttgccgctttttggacggcgcgctgcagcgtttcatcgaaagtatacggaaaagcgtccacctcatccacaattacggcatcgaaagcagatgcgaagcggtacagctggtgggtagtggagatcacgagctgcgcccatttatggcggtcagggctgccgccgtagagcgcggcaatcagaatatccgggaaaacgcggcggaagcggggggcaagttcaaggacgacatctgtccttggtgtcgcgatgcagacgcgttcgccgtttgcaagcgccgcttcaatcccgttaaaaaggacctctgttttacctgctccgcaaaccgcccaaaccaagagctcattttttgggagaatggctattttgaccgcttcggatgcggcctgctgcccttcagagagggtcccttcccaatggagcgggtgccggggcgggtggaatgcgggcgcagggcctgcccatgtgaaaagcggcttgcatgcggtaacccgccccatcatcaggcagttccggcaatagatgctcgttttcccgcagtgggcgcaagggaattcggcaaaaagatgcggcgcgcggttgccgcagcgcaagcagacacagtgcgggaattcgccctgaatcgcaggctcggcgcggatccagccttgttttaagtgctgttcgactagttccggcgaaaaagggatttccggttcgagcaggatcctccctgcgaggtggcgttgaagctgttcggagaaaacagaaggcaaagtgatcactcctttgtcaattgcgggggaggtaggcaaatggggcggcccggttccaaacggattcgggaaaaagcctgtacggatgcatggattacaactgcttattcaatcgcggattggccggcggggttaaggtcttgtcccgggaaggatacgcttaatcgctaaaatcctcaaaaggtattggctgtccggcaggtttcaaggcttgtccccgggcctgttatgccaggtttatcccggacgatcccatcttgccgggctgttccagcgatttggaacagcctggctcttatttcagcatccaggcaacgccgatcgcgccttcgccaaggtgggtggcgatgaccgggccgaagtagctgaccgaaaaatcgacgtttggaaaccgtttttccagttcatctttgatttcaagcgcctgttcttcccggttagcatggataatggagcatttcagcggcaagcctttggcggcatcctcgccgagcaggtcaaaaatccggttgagcgcttttttctgggtgcggattttttcaaacaggacaatttcatcgtcgacaaaagttaaaagcggcttgatttttaataggctgccaataacggcctgcgatccggacagccttccgccgcgctgaaggtgggtgagatcatcgaccatgaagtaggctttcgtggatgcttttaattcatcgaggcgggcgaggatgtcttccggttcttttccggcaagcgccattttcgccgcatcaatcgcgtaaaatccctgtgccatgcagctccatccggaattgtaagggtaaactttgatcccttccaccatcccggaagcggccacggcaccctggtatgtcccgctgatttttttggacaagtggatgctgattgcggcatcgtagtcttttttaagctgttcaaacagttcgacaaactggccgattgacggctgcgaggatgtcgggagctcgtccgccgtgcgcattttttcaaaaaacgcctctgctgtaatgtcaatttcttcgcggtattcttccttcccgaaaatcacattcaatggaatcatgtaaatcgagtatttttcgcgtacttcttttggaatataagcggtactgtcggtcacaatggccgtcctcatttttccatctcccttccgctttactatttttattttagagcctctgccaaaatcattttggcaaaggctcttatagaatcaggaaccgtttgtcagccgtcttctttctgcgcaatatggaaatctgttttgtggctggcgctttttctaaattttcctttcagtttttctgcaagtgcgcaacatatttttcattcatgccggagattctcttcactgcaaaaatattttcccttacaaaatgacgaaaattatacaaaattgtaaataataccatgcctggaagccaaaaaaggaagaattcgtatggtccagcatgcaatcattcacttgatggcgctttcttttatggaaaaatgaattttttctataaaatgttcgtgttttcgcctttctcaaaacttaattttctgttttatctgtcctttacaaatcatgtcatattttgtagaatgtctaaggtaactcaaatggtgcatgcaactcagagataaaaagatgtaacaatcagatttaaaatatttgaaaattctccgttggcaaaattattggatcacatcttcatcactgggttggctgcaaatagaaggagattttcgagatggaattattcaggaaaaaatcaatggattacatgcttaagcaggcccgcggaaaaaagagcctgcaaaaagcccttggcccctttgatttgaccatgcttggcgtaggggcagtcatcggaacaggcatttttgttttgaccggtatcgttgctgcgcaggcggcaggcccggctattattctgtcctttattttttcagggattgcctgtgcgttaacagctttatgttacgctgaattcgcctctatgatccctgcttcgggaagtgcatacacttacagttatgcaacgtttggcgagttgtttgcctgggtgcttggatgggacttaattctggaatacggcctggcctgttcagttgtagcgagcggctggtccgcctatttccaggatctggtgcgcggattcggcatccatttgccacaggctttaagcggcgcctataatccggccaagggttcgtatatcgacctgatggctgttgtggtcgttttcttcctgtctgctgtgttgttgaccggcgtgaaggaatcgagcaaaatcaataatgtcatggtctgcatcaaaatcggcgtcattttattgttcctcgccgtcgggattttttatgtcaaaccggagaactggacgcctttcatgccttatggctttagcggcatcattaaaggggcggcaaccgcattcctcgcttacatcggatttgatgccgtttcatctgcggcagaagaggttcgcaacccgcaacgggatatgccgatcgggattatttcttccctagcgatttgcattgtcctttatgtcgctgtatccgcagtgctgaccgggatgattccgtatgccaagctgaatgtcggcgatccggttgcgtttgcgctccgtgttgtccatcaaaattgggtggcaggctttgtttcactcggtgcgattcttggcattacaaccgttctctttgtcatgatgtacgggcagacgcgcctgttctttgcgatcagccgcgacggcctgcttccaaaatcgatctcgaaactgacggaaaaaacaaaaacgccgacaagaagcatcattttgacatggctgatggcaacggttttctcagccgttgttccgctgaaccagcttgcagaattgaccaatatcggcactttgtttgcttttattgttgtctcgatcagcgttattgtgctcagaaaaacacggccggacatcccgcgcagttttaaaaccccgttcgtcccggttattccggtactggcagtggccgcctgcggttatttaatggtccacctgtcgaaagtgacctggattggctttctcatatggttcatcatcgggcttgccatttatttcggatacgggtaccggcacagtgaactcgggcattggaaagatggcagaacgccagctgacccagttaaaaattaaagcaggaaaaacgcagaaagcaacacctgtataaaatgccgggcggggcagcggaaaagcaaaatagcatttgcattatgccgccatttttcttcaaagagggcaaaaagcgtacggacgaacgctttttgcccttttacaatgaaacaccggaaaatgaaggtggcatacaggtgtatagttaaaaaaaggatctccggcgcgcggacgcgaaccggagatcctttttgtgcgccattcaaggccttgacatacataagtgtacggccaaggccttgttttagcggacttcaacccacccgtttttaatggcggttaccaccgcctgggtacggtcttttacttttaatttttgcaaaatattgcttacatggtttttcactgttttttcacttatgtataaagcatctccaatcgcccggttgctttttccgtccgcgagcagctgcagcacctcgcactcgcgcggcgtgagcaaatgcagcggcgggacaactgccggcggctgctgataggcgccgcccggtgtatagcggttcgacaatttgcggaactcttccacgagattatgggtaattttcggatgcaggtaactgccgccttcagcaaccaccttcacggcttcaatcagcgcatcggaatccatttcttttagcaaataaccggttgcgcccgattttaatgcgtgagtgacatacgattcatcatcgtgaatggaaagaataataatttttgtttccgggtaggcctcgatcagctttcttgttgcctctaccccgttttggtgcggcatattgatatccatcaggacaacatccggatggtatttttcaataatgccgagcgcctcctcgccgtcttccccctcggctaccacttcaaatgttttttcaaattccaaaattcgcttgacgccctcccggaacaactggtggtcgtcaataatcgcaatttttaccgtcatggtcaccttttctccttttccaagtctaattgcatcgggatttggataatcaccaatgttcccgctcctctttttgaatggatggaaatttcaccatttaaaaggctgactcgttccctcatgccgacaatgccaaaagccccttcgcgaatgctgcggacatcaaaaccggtgccgttgtctttgactgtcgcgataaaactgtttttcctcagctccgacttcacctggatttctgttgccttcgcatgctttaacgcattttggacagattcctggatgaggcggaaaagcgcgatttcataattggtcggaagccttcgttcttccccgagatgcctgtatgtaataaccgggctccctttatagttttcaatcgtagacaaatatttttttagcgtcggaatcagcccgagatcgtctaatgccatcggccgcaaatcgtaaataatgcgccgcacttctttcaatgaatcgcgcaccagttcttttaacgtgcgcatttcagcaatggcttcctccatgccattttcatgataaattttttccaccaggtcggaacggagcagcatgttggccagcatttgtgcgggaccgtcgtgaatctcccgggaaatacgtttccgctcttcctcctgcgcttcaatgacacgcaaaccgaattcctgtttatgctttgcatcttcaatcgcctcactgatattttgcaagtcgcttgttaaataatttaacacgaccgttgtttgcgagacgagatggttggcccgatcaatcgtatcctttaatgaatacagcctgcgttccagttcatttcttctttcacgcagctgaagttcgcgctgccggttcatggacagctggatttggatcgtatgtgccttctcataagcttcgcgcacctgcttttcggaaaagtcccggaaatgctggcttacttccgccaggcgccgccttgcaaatttggacttcgtttccagctcgtctgtctgctcaatgactttagccactgttgctttgacttcctcaagctcattgatgagcgcatcgtaatcctggcggcatctttctccgatttcaaaaatttcgtgtttgctttcttcaactgttgcaaccattttctctaggatcgcatccaatgctttggagtcgaatgttttaaaagtcatcttacttcccccaaaaggtataataaaggcttatccgaaagcagggcaagccacagcacacacgcggttaatgttattttagcgcgaaaaccgccggtaaacgatcagaaaataaagtataaccgtatatcaggactattttcccaggtactttcgtaggaaaacacgacccgatatacggcagtttcaacatattcttatatactgaaattatatcatacaaaagcatgttataatgagagaaaaacaggttttgctaaaggaaggttgcaatgttaaaagaatattatacagtcaaaggcgaggctgtgcatgaaatagatatccagaaatcacggtttatcgcccatgtgaagcgggcggaatcggaagaggaggcgctcagttttatcgcttctgtgaaaaagaagcaccgggacgctaatcacaactgttccgcttatatgatcggtgagcagaatctcattcagaaagcatcggatgacggcgaaccggccggcacagcgggcgttccaatgctggaagtgctgaaaaagaaggatttgaaggatacggcagtcgtggtgacgcgctatttcggcgggattaaactcggagccggcgggttgatccgtgcgtacagcaaagcagcttcagaaggcatcaacgcatgcggcatcgtcaaaaggacgcttaccgccactttccatgtcaaactggattatacgtggctcggaaaagtcgagaatgcgctgcaccattccccttatgaaataaaagaaatccggtacctcgggcaggtggagctggatatttatgtaaaagaaggggaacagcatgcttttgaaacgtggatttcagatttaacgaacgggcaggcggatgtggccgagggagaaaaactttatttggaaacggatgttgcccggtaaagagaaacgcacaaattggaaaaagcagaagcggaaagcccgtcatccggctttctgcttttttataccgcaaacggctgaacaagcgctgagccggacacaaccggccgtggcgggagatactgaaatctcagccagattgacgtaaaatttgggacttgcaaaacaggttttcagccggccggaacgtcatcatcgttacaatgaccaggggctgccaaaaccgcaaacccgaaactgccagttgcggttgtgtgcaggtaccgccccggattatttattgcgggaacggccccggtggatccggacggctatgaccggttttttataaaatttaacagcggcttataatcttttccgaccaggccgatgctttcaacgaaaatttcaattgtaatcaggatcacaccgataaaaatgagcgagccccaaagcgtcgccatcgagaagataaaggcggcgaggctgaacatggcagcaatcgcataaataatcagcacgacttggcggtgtgaaaagccgaggcgcagcaggcaatggtgcaaatgcaacttatccggggccgataaaggctgcttatggacaagccggcggataatcgcaaagaaggtatccgaaatcggcacaccgagaataagcgccggaataatcaaggaaataaaagttacatttttaaagccgagcaatgacagcacggaaatcatgtagccgagaaaaagcgcgccggtatcgcccataaaaatctttgccggataaaaattataaaataagaacgcaatcgtactggccatcaaaatcaggccgagcaccgtcacataggcgtcccccataatgatcgccatgccggaaatcgtcagcagtgcaatcgaggaaacccccgcagccagcccatccaatccgtcaattaagttgatggcattcgtgacgccgacaatccacaaaatcgtcagcgggatgctgaaaatcccaaattccagctgtccgccgaaaggaagattgatgaattcgacatgaatgccgcttaaaacgacaaccagtgcggctgccagctggcccatgagtttgacgcgcggcgacagctctcttatatcatcaatgatgcccgttaaaacaataatcaagctgccgagcaaaataggcagcgaatgcgggttgtccggctgaagcaacagcacgccggcgataaaactgatataaatggcgaggccgcctaaacggggcatgactttcatatggactttccgctggttcggcttgtcaactgccccgatccggatcgccagttttttgatcagcggcgtcaggagtattgtgagcataaagcatataaacaaggtcaggaatatcaatgtgctgcctcctttggttgatcataaccaataaggattgaagtggtcgtgaacgcgccaccgatgcctgagcatgataaccgtttcacttcttctcgaaaacatcataccttaactttcttaacataagcttaaaaaaatatttacccgaaattcactgtaatcattataattgttctccgacaatttatccactatcatttgagcgaatctactatttttcatgctttttttcgcagtgggatggccgccagcggttttttgccgtgcccaaaaaactgcaaaaaagggcatccctggccattttagcgtcaggatgcccttggaacaagaatcgcgttgtttaagcgaagcggccggcatctaaaaacaggcctttttagcggccacacgggcatccgtgccgctccccggaatactgctttttgtgccggaattgagctttaccgttttctgcagggggatggccggatggccgttgcaaattttacttatcgaaacagatttacggctttattcacgacaagcccgctgccgccgcggtgtttaacatcttcaatcagcatcgcaacaagcatattcgggtttttctcgtcatatacgacgaaaaagccgttttctttgccgttttggtctttttggctctttttcagttcagcggtgcccgtttttcccgcaagctgcgccccggagatattggcagcgtgcgccgtgccggacggatccgcaacaacctggcggagcatgccggaaatctccccgctagttttgctgctgacagcatgtttccaaacttttgttttttcacccgcaagcaaatttggcttcagctcatcgccgctatttaaaaacggcgtgtagctgatggcgagatggagaatattcatttgcatctgcccctggccgtaacctgtgtccgcaagctggatgtcgctgctgaacttgccggtggacgaaatttgcgatgcctttaacggatacgcaaacggaatgtcttccccgaatccgaaacccttcaggccttttgcaaatttgtccgccccgatatcaagcgcggtttgggcgaaaaagatattatcggataacactagcgctttttccatgttttccgggctgttgttggcgtggacgcgggtcactttatagctgccccagtcagcgctcttttgccatgaagtccctgtaatcgtttttgttgccgcggctgttgtagtcccggtatcaagcgcaatggcagctgtgaccggcttgatcgttgaacccggcgcatacgtaagggcaaaccggttaatgagcggcttacccggatctttttcaagcttcgtgtaagtggaagaagacatgcctgaaataaaatcattcgggtcaaaagcaggcgtgcttacaagggcaagcacatcacccgttttcggctggatggccgcggccgtgccggcatcccccttcatttgattgtaaattttcttttgcaattcggcatcgattgtgactttgatattttcgccgttttttactttttgttcagcaacggtgtaggtgcttccgtcctgcttctcaatgtaaatcttttcacctgcccggccgcggagcttttggtcatacaactgttcgagcccgcgcttgccgattacactctcagcagtatagcctttcttttccagctttttcagttcttcgccagtgatggcaccgatatagccggttaaatgcgcagcggctttcccgtaaggataaacgcgggcatcaaccgtttgcgaagaaaagcccgggatggatgtgactttttttacgagatccttcttctccattgggactttttttaatgggacaaacaaatgaggctgcacccagtcctcgtccagtttttgtttgatttcatctgctggcatgccaagcaggtcggcagctttttgcatatccgcttgtttatcccctttcaattgttccggaatgacgccaatttggtacacgctgccgttttgggccaatgcttttccgttccggtccaaaatttccccgcggacagcgttttgttcggacactttaatcgtatcccctttggccaaatgcgggagaatgagatccggcttccaatcaacataccagttttcttttttgtcccgtttttcctttacaagcgccactttatccttgtaggcgacttttccggctgaggtttggaacgaaattttgaccggtacggtaactttctctttgtttttataggcgtctttatccaacggtttgtatgaaacatttaaatctgaaacattcaagtccccgtacacttttttgtaccggtccgccacctcttttttcgcatacgttttctttgtggaagccgatacataactttggtacatttccgcaaatttttcctgctcccacgcttttacataatctgcaaggcgttcattcggtgtcggcgttttttcgcaaccggcaagggccgcaaaaacccccagcagcaaagcaactacgaatacatatttcctcaaaaaatctcctccctgataccggcaagcttccaacttttgagaaaaaaatggagaagtttgccggtttttgtgttacatttgtattagataagaagaactagatttggaggtaagaacgtggacaccattacacagttaaaagcagacaacatgcgcaaaaaaagccttctgatgtttattaccttgcttgttgccctgctcgtcatttttgcagcctatctgtacaaacaagaggccggaatggctgtcctgtacggagtggaaattgttgttcttctggccctgtattttgcactcgggcgcgccatgaaaaaattccgcctgttttcttatgcgagcgtcatcatttcttatttgttcagaatatatgccatcctttttgtccaaaacagcttctccgtaaatattttgtttttctttctgcttgcttatgcggcattgcagtttgaaaatgtccttttctttatcggagccggccttggcattgccggatttcttgccagctactggctgccggccgccgatgcgggcctcattcacaacctggtcccgaccgctgtgctctgctatattttaaccgcaattttattatacgccatgatctacctgcatcaaaatttgatggattcttttcttttatccataaagaaaacgattcaaaccatggaagaccaaggcgcggcttaccggcaggaaatggcagcaatcattgaccgcgtttccaatgtgaacgacaatatccagaccaatttgcacgcccagaacgaaatgaaatccgccgttcatgaaatctctaaaggcagtgtaacccaaagtgagcagattgcgcaaattgccggacacgccggggatacggtgcaatcgatggaatttttaacacaaatgtccggtgaactgacaaacgaatcacttgaagcacaggaaacggcaaaagccggggaaaaggcggtggaaaatttaacgcttgaaatcagtgatgtggtagatacgataatggagttgaacaacacatttacagtgttaacgcaaaaagtggaagaaacgaatacgtttaccgacagcatcaaacaaattacggaacagacgaacctgcttgcgctgaatgcttcgattgaagcggcacgcgccggggaagcgggccgcgggttttcgattgttgccgatgaaatccggcgccttgcggaaacgacacacgagacaaccgaaaaaattaaccataatttggctgatttgaatcaaagcaacgcggcggcacgggataagctggaattaagcagcacgcaaattttgacgacagcggaatcaagccaaaatgtaacgacctatttccgtaaactattaaaaactttaaacgggcaggttgagaagtttaaagaattcgatacgttatccaaaaaagtgaccgaaaaggcgcatggcgtggaaggcgcatcaagcgaactcgcggccatcattcaagaaacctctgccagcctggaagaaatgtcagccacgattgaaagcttaacgaatgaccaccatacgatcgcagaaacgctcaacgaagcggctgtccaggcggagcagttccgggcaaaaaccgaaaaaatgcagaaaaagtttgccgatcaaatcatttagcagacggcctgccgtttttccggacaagcagaacatatcccggtcctggttttcctttccgcgcatgcgtgtacggccgcttccagggtaaatttgtttgcaccgttttccgggttttacattttgcgcatgcgcatacagccgcgggttttgccggaaaaggaaaaacgcaaacaattgccggtttttccttttccggcaaatgcggaaaacggccgcccgggttttacaggggagccccgcgtgagggataggcattttgaccagcggccccgctgtttgaccaaaatggtaaatccatccattcccagtagcaccatctgctccatttcgctgttttgcgccgctttcattggaaaaaagtgcaatcttttcctataaaatgccgaaatggggtaccattgtgaaaaaattttgatagaatgataaatagagagataaaaatataaatggaggttacacgagtgtgagaaagaaaacaatcttttctgttgccgctacaaccattctggccacttcgtttacatcgcaggcatttgcccagacatataaagtcaaaaaaggggattccctctggaaaattgcaaagaagtataatacgtccgtcggtgcattgaaatcaaccaaccatttggcatccgacacgatttacccgaaccaggtgctgaacgtttcggcgttccaggcaaaagcttcggcccgttctgtttcggccccatcctcttctgccaaaacgtacacggtcaaatcgggggatacattaagcgcgattgccttaaaccacggcatatcggtttcaaacttaataagctggaacaaactctcttcatcgctgatctatcccggtgacgtattagccatttccaaaggggcaggttccgataccccgtccagttcaagcagcagtccaagcagcagtccgcgtccagctggcagttcgagttccacgactacatacacagtaaaaagcggagacacattatccggcatcagcaaacagtttgggacatccgtcagcaagctcaaatctttgaacaatttgagttccgatttgatttttgccggccagaagctgaaagtaaccggcagcagcccgtccggttcttccacatcgggaacggcaggtactgcaaattcaggcagttccggctccacggctacagctacatacacggttaaaagcggagacacgttatccggcatcagcaaacagtacgggatcgccgtcagcaagctcaaatctttgaacaatctgagctccgacttgatttatgccggccagaagctgaaagtaaccggcagcccgtccggttcttccacatcggtcacagcgggcgataccacttcaggcagtagccattctgtatcgtctttgatcagcattgcgaacagcttaatcggcacaccgtatgtttggggcggcacgagcccgtccggatttgactgcagcggctttatctgttatgtatataaaaaagccgggtacgatatttcccgtacgactgcagcaggcctttataaccgttcttactatgtgagcagcccgaaaccgggagatcttgtcttctttgaaggcacgtacggaaccaatccgagcgcgatcacgcatgttggtatctatctcggcggcggccggtttatcgccgcgaattccgatggcgtgtcagtttcttctgtcagctacaattactggaaatcccattttgacagctataaacgtttgtattaatttgccgttctataaattgaactaaaaaaccgcggaagattccgcggttttttttgcatctgtaccggcttgccccggcatgacctgtttgacccttcctacatataaaatttaaagcggctgccggcgtattgcgctttgacatattcaaacggcgtgccatccgaaagcgaagttacgcgttcaatggacagcaccggcgaacctggggccacttttaacagttttgccagccgtgcgctcgccgcaacggcttcaattgtctggaccccttttccgagccgcaatcccttttcgcgttcgagaaactggtagaaagaacggtttaatttctcttccgtaagccctgccgaaatccttgccggggtgatgatcgattcgaatacaatcgggatctcatccccgtaacggagccgctcgatatggagaacgtgttccggctcttccagcgcgagtgcctccatttcctgcacggaggcttccctttccagaaacgccacgattttattcgaagctttcatcccgcgctcttccatcagccgcgtaaaactcatccgcccttccaaaggctgctccaccttatgttcgctgacaaacgtgccgcttccccgttttctcattaaaatgccttcatccaccaaaccttgtaccgcctggcggactgtcattctgctcacttcaaaaagttcgcttagtacccgttcagacggaatggcttcacctgttttccattccctctccctaattttcttccggatttcttcctgaatttgaaagtaaatcgggatcggggaggttttgtcaatcatggcgctttccggcatcctccagcaaagaagcggcatctgcatcagcaacgacaacgacatccggatgcatttgcagaacggatgccgggcaggcttcgtccaccggccctttgatcatgctgcggactgcttcagctttgcttttgccgaatgccagcagaacgatttttttcgcgtccataatcgaagcaatccccatcgaaagggcgcggtccggcacatcttcttctctttcgaaaaagcgccggtttgcttcccgcgtcgattcggtcagttcgacaatatgcgttctggaatggaaggaagtgcccggttcattaaagccgatgtgcccatttttaccgatgccgagcacttgcaggtcgaccggatgcaattttaaaattctttcataccgcgcgcattcttcttcgaggtcttctgccgttccatcaggcagatacgattgtttaaaattcatatgcgaaaacagttctttttccatgtaatagtggtagctgtgttcatctgtatctttgaggcccacatattcatcaagattgacggtggtgacatttgaaacgtccagtccggcattccgcatgtacgcatacagtttcagcggcgtgccccctgtcgcaagcccgagcgtgcggatttgcccttcccggatccctttttcgatcagttcataggcgtattttgctgcttcatcgcttgttttaaaaatttccacgttcatttttatccccgctttccaagatcatcgttttttaatctgtctttcctggccatcagacacatttcttacacgcatggtccacagcaggttgcgtgttatcccgctttccaaaatgatacgttagtttaacgtgccatggtgcatccagcgggacaaaatcggcatctttccagttttagccgggaccgaacccgcacgcctgtggttggcaacagtttatgcgcgttatccctgctctccaagatggtatgttgttttgacttgccattgttcatccagcagtacgaaatcggcatctttaccagctgccaggcttcctttttgcgtgaggccgaactcgcgcgcctggttcacggaagtcatctgtaccgcttccgaaatggagcagccggtaaatttcatgatgttgcggaacgcatcgtccatctttaagatgctgccggcaagcgcaccattttcaagccgggcttccccgtttttcaccagcactttctggccgccgagctccgactccccgtccggcaatcctttcgcccgcatcgcatcggtaatgacggagattttttccggcccctttatttcatacgtgaacttcaccatatccgggtgcacatggaggccgtcagcaatcagttccacttgtacataaggtgacagcaacgcatgccctgcaacgccgggctcgcggtggtgcaggccgcgcatggcattataaagatgggtcgcatgggttgccttgctttgtaacagttcagcacggacggcatctgaatggcccatggaaggcacgatgccgcgttcaatcatcacattttcaaattcccgtgcaccttcattttctggggcgtaggtgacgagcttaataagattcccggaagcttcaacccatcttaaaaacagttccgtatccggcgccttgatatattcaagcggctgggcccccgctcttttttttgaaacaaacggcccttcgagatgaatcccttcgatcgttgtgccccctttttcttttgccgctttcacggcacgcaaggcggcttcgatttttccgtaatcctgggtcatcgttgttgcgaaaaaggaagttacaccttccttccgcaatttttggcttaatgtaacgagcgcctccggatcggcatccatcgcatcaatgccataaccgccgtggatatggacatcaatcatgcccgggatggctgtcatccctttcccgtcgatcacttcttctcctgctttcggccggtaatctgccattttgccggtttcaatgattttatctgtaaaccggataaatccgtctgcaatatgttcatttcctgtataaagattgctgtgaatcagcactttttccgccaacggaaaacacctcttttttaaaatttatatagttgtctataccaattatcatttattgtgtttcagttgtcaatctttattatggagaaaggatttctttttatacaggttctttcctgattgtctgtaaatctatttttccgcggtaagttgagatatactagaaaaagtgcagaacgaacaaatcatggaggattttttatgaagcaaaccaatatcaaggcggtcacgattgctttgtttgtggccacctttttaacagccattgagggaaccattgtcagcaccgcgatgccgcggattgtaagcgatctgaaagggatcggcgtgatgaactgggtatttgccatttacttgctcacttccgcggtaacggttccaatttttgggaagcttgcggatttgtacggccgcaaaaaaatttttacggccggcaccattgttttccttgccggttcgacattgtgcggtctcgccggttcgatggggcaactgattgtgttccgtgccattcagggaatcggggccggggcgatcatgccggttacgaataccatcgttgccgatatttatccgcatgaaaaacgggcgaaaatgctcgggtttatgggagcggcatggggcattgccggtgtcatcgggcctcttttcggcggtttctttgtcgacgagctcacctggcactggatctttttcatcaatctcccgtttggctcgatttccgttttgatggtcatcctgtttttacatgagcgggtggaaaaaacggaaaatgcgattgatgtatggggggctgccaccttttccgccgggatgctcgcattgctttacgccctgcaaaaaggcggggatacaaacgactggggaaacccggtgatcttgggattgttagcaggcagtgtcattctccttggtttattcattttgattgaataccggcatccggatccattaatgccgctttcgttgttccacatccgggccatttcggtttcaaatctggtttgttttttgggcagtgccgttctgatggggattaacgtttatattccgatgtggatccaagggcttgaagggcatggcgcaacgctatccgggctcatgctggcaccgagccccgtcctgtggatgctcggctcttttgccggcggaaggcttcagctcaaatacggggaccgtttggcgtttttaacgggaatggccttcattttgggaagcacagtctggctcagcctgttttcattgggaacgcaggaatggagtttttacgttttctccgccatttccggattcggatttgggattgtcatgacgatctcgctcgtttcggtgcagtcggcggtggactggtcattgcgcggggcggcgacggcatcgaatacatttttccggaatctggggcagtcggccggttccgctgtattcggtacgtattttaatgcaaagattgccggggaacttgcgaaaggcaatccgggcgggtttacgacgaattcgctgaacaggctgatcaatccggaaagcgcgggccgattttcggaagcagcgcgcgaatggctgcggcatgtgcttttttcaggcattcattcgattttcatcctgcttgccgtaatttcacttgtttgttttcttctctctttcgcggttccgaaagcggaagggaaaaaggggctgtcctgatacgcggggctgcctcttttttgtttttcagatgattccggcagggcagttgcggattttaaaaaaagccgcccctgtttgcgggacagccctttgtttaccattgatacggtgtttcctgatatacataatagttcagccagttggaaaacagcaaatagctgtgcgagcgccacgtatggagcggcctctcattggcatcgttattcggaaaataatttttcgggagggcggtgccaagccccttttgctgatcgcgcacatattcatcagcgagggttgttgcatcatattccaaatggccggtgatcataatatttttcccgttttcatccattacaatgaacggcgcgccctcttccgatatggaaacgagctgaagttccggatggttttcaatggctgcgcgcgcaacatccgtataacgggaatggggcgcgttaaaaacctcatcaaatccgcggaccagcttaaccatcggcaaaaacaagcggtgtttgaaaatgccgaaacacttttccggcagttcgtacttctcaatgccataatggtaatacaatgcagcctgcgcaccccagcaaatatgtaatgtcgacgtgacattggttttggtccaatccatgattttcttcagctcgtcccaataatccaccgcttcgaagtccattttttcaactggggcgccggtaataatcatcccgtcaaaacggcggcctttcacttcgtcaaaaaccgtgtaaaaatgttctaaatggtagctgctgacgtttttggattggtaagtcgacgtccggagaaaagtgatgttgacctgcaacggcgtattgccgaggaggcgcagcagctgcaactccgttttttctttttccggcattaaatttaagattaatatattcagcggacggatatcctgcgttctcgccctgtcctcatccatcacaaaaattttctcttgtctcagcagctctccggcaggtaaatctttcggtatattgattggcattttcaacgtctcccccatactcagttgtcatgtatttttcattatatcggttttctgccgtttgctgcaatattcttgatagacagacattttacggatgggatacgatcagcgtcagacggccttccagttcaaaattgccaaatccggacggaagcaaaaaatgcatccctttttcaagcggataagtttttccgccggctttcatggccccttccccgtcaagcacactggccagttcgaacggttcgttttgcgtaaaaagtgcggtcccttctacatcccatttatatacagagaaaaaggcttccttcgcaaacgttgtgatggtaacgcccggtttttcttccgtacgggggcggactgcggcatcccggtgcggtatcatcgtaacatcaatcgctttttgcaaatgcagttcgcgtttgttgccggcagcatccgtccggtcgtagtcataaacgcggtacgttgtatcactgctttgctgcgtttcgagcacaagtgtcccttcgcaaagcgcatgaatcgtcccgcttggcacatagaaaaagtcccccgggtgaatcggcactttgcgcagcaggctgtcccattttccttcttcaaccaggcggacaaattcttctttcgttttggcatgatgcccgtaaacgagctgtgcgccttttttgcagtcaatgatgtaccagcattccgttttgccgagttctccattttcgtgttcattggcgtatgcatcgtccggatgaacctggaccgataaatctgcatttgcatcgaggatttttgtcaggagcgggaatccttttccagacattccgccgaatacgtcacgcctttcttcccacagttccatcagcgttttgccggcaaattcgccgttttttacagttgacgggccgttcggatggccggaaatggcccagcactcccctgtatggtcagacgggatgcggtaaccgaaccggtccctcagcgcggtgcctccccaaattctttctttaaaaaccggttcaagaaataaaggctcggtcatacaaattttcctccttgaaaggcaatcctttgctcaaatatgaacaaagcattttcagtccttttcattatagcataccgctcctgcagccgcgccgtcagatttcatacaattcgatcggaaggccgtcgggatcctggaaaaaggtgaattttttctctgtaagcgggtcaatgcggatttcttctacttgaatgcccatttcttcaagccgctttttatccgcttctacatcgtccgtttcaaatgcaagatgccgcaagcccgcagcttccgggaatgtcgggcgcgcgggcggatccggaaaggaaaacagttcgatctgatatacgctgccgaccgaaagatccagtttgtaggaatcacgttctttcctgtatacttcccgcaccggctccaaaccgaggcaatccacataaaaatgctttgattttgcataatcggaacaaatgatggcaatatggtgaatgcgtttcaaccttggaactgccattatttcccctccttccggtatgtccagccttcttgctggtagacggtgccgtttttcatcaaacggccgagcgcacgtttaaacgccgctttgctgatgccaaaccgctcctgaatctcttccggcatgcttttatcccaatacggcatttttccgccgcgcgaatccatataggcaaggatattttccgcatctttatccaatacttcataagcgcgccctaaaagcgagatattcagcgtcccgtcctcttttacatcaatgacgcggccttccactttctgcccgaggcgcggttcgtcgtcgcgctgcgattcatggataaaaccgatatagccgtcatctgtgatgatggtcgaacccgcttttgccagccggaacacatgcccggtgacatctttgttccacatttccctgccggcttttttcgctaaatccctgactatgttttccccggctaattttgcgaataatcgcccatgtttgtcaagatcaagggtaatgtataaatgatcgcctttttccggccagagcgagcggatcgggggcaggtcatcaacagaaagaagcatatctttgtgaatgccgatcgaaacgaaaacgccaagtttttctttggtgccggcaacttccgcccagccggatgtccccagccggatgtctggaatcacgtttgtcgcggccaacctcccctgatggtcctgatatagaaagacggtttgcaccgcttccggatcaaagggttccgtaatatcccggtgatgcaggagcacgtcttctgtcccgttagataaaaaataaccgaacggcgcttcccgcaccaccgtaagttcggcaacggttcctggtgttaaatccattgcagcagtttcctcctccgtaaatcgtttgcttcataataggtaattataacattgatcggcggaaaacatgattttattttgaacaaggagtggaaatactatgcctgacaaacgtgaggtgacgcatcgggacaatgaggcggaaacggttgtcaatgatgcgcatgggagcaaccaggttggcttgttcagtgaacataagccttataaaccgtttgctgtgacagcactggaaacggatgaggatatgaaaagattcgcgaaatttacagatggcaaacaggagtgatccaagtgagtaaatcaaagcgcgaagaagaacgacagtggaaagtccggaaagaatcgcaaaacccgcacggcaaagtgaaatctctggaagaaatcgcggatgagatattcgccgaatggaaagagaaaaagtgagataaaggggtgctttcatggcaccccttttgtatgctggagaccgtgcccaatcaggttttccgaaatggcttaacgattccatagcgggcgcagacaataaaaaacccgttgaaaacagaggtttcaacaggcccgaaaaatggcaacaaaaaataactgtttttttaacttccgataactggcagcacgcgtacttcttttttcatatcggagtggcagagcgggcagtgcggcttttcttcaaaagtaaagttttcacgcataaaaccgttgcaatcatcgtttgtgcaggcccatacagttgtttccacctcaggcaccggctccttctggttattaaaatatgccatcataaaagactcccttcttatgtttagtataacacactttaacacaaaaaagggaccggacctgctgcgttaacgtatgcaggcaagtgtgtgcaaaccgtcccggtgcattcatgcatacttctattatatgcatgcttccccggctttatgcgcccgctttgcaccaggcaagggctgcggcttgcaaccgggctggggccggtgcctgccctgctttgatgcattggcagcacccgctttacattctgatccactttccgcaagttcgcggctattttttcgcgcccctgctacttttgaagccggtacttgcactgcttcaagatctgccctaaatgcctgcccacttttcgaagggttcggcaattttgtttgcaatctatgccattttgaaaccggaacctgcactgcttcggcgcctttgcatgatctgccctaaaatttgccccgttttccgcaaagtcgcggccattttctttacacgcacatgctattccgaaaccgagatccgcactgctttgcaacgcccggccaatcatttttccggcttcgccattttgctgcccgttcatccgcttttgcggcaaacgagttttgtggcaataaaaattttcttggcaactgttctgccttccaaacgttccagcagcgtatcgactgctgtctcgcccatcaattccgtatacactttcacagtagaaagcggcgggaaaacgtatttggacagcgagatgtcattgacgccgataaggcttacgcggccgggcaccgggatgttgttttccgcaagcgccttaaggcaaccgatcgcaatcgcatcattggcggcaaagaaagcagttggaagcgcgtccccgtgttcgcggaccgcctcgttcatcaaccggtacccatcttcagtcgaaaacgcgccgatatatacccatttttcattccagcggcccgctgcctgcatccagcgcctgaacgccgtttcgcgcggatcctcaatcgtggcggaggcatctttataattttccctgccgccgataaagccgatttgcgtatggcctttttccgtaaaataggtgagcactttttccgtcgctttttcaaaatcggccacaacggcatcaaaacggttgtcatcaggcgagcagtcgacaaatacgatattcggggtaacagagagaagcttctccacttgtgcaagactgaatttcccgacagcaataatgccctggatttgctctttccccatctcttccaaatgggtcaaatcgtatttcgtcagccggatatttttcatgctgcagcgcgcttcaatgcccattctgatcgataaataatacaaatcattcagttcttcttgttccgtataccagtacactagcgcaattttgattttttccggtttccgggctgtttttttcttgtaggaaagcgcttctgccgcttcaaagattctttttttcgtatcgtcacttacggaaagtgacgggtcgttattcagcacgcgtgaaaccgttgaaatggaaacacccgccttctcagcaatatctttaatcgttgccattgttacacctcaatctttttcagccaaaaatccattttgtatgggcgcggtatgtttcacccggctccagaatcacagacgggtattcagggtgatggatcgcatccggcacaccctgcgtctcgaggcagaccgccaaataatcacaaggcttgcggccgcggatttcatatgtgtcatttcccatcgtattgctagtataaacgacgacgcaaggctggtcggtttccaccgttagcatgcgcccgctctcttcgtcttttaagcggatcggtttttccgtttctggcaataaaaacgcgtggtcatagccgtttccgacaaggacgttttgcggatgatccgataccgtgccgtcttcgatttttcgcccgttccggaaatcgaacgcggtacctctaacatcaaatgttttccctgtcggcagcgtttcccggccaagttccagcacacggccactcgggatttgtagttcatggccgcgcacatcgcgtttcatgtcgccgcttaaattgaagtatgcatgattggtcatgttgacgatcgtttttttatccgtatgtgcctgataagacagcttcagttcttgttcatttgttaaaagataggtcacggtggcatcgagattcccgggatagccttcttcgccgtccgggcttgtatacgtaaatttcacaccaactgcgccgtcttgttcaatgggcgtgctgtcccagatgacggcgttaaaccctttgaagccgccatggatatggttgcggttttcattggcagaaagcttgtatgttttgccgtccagttcaaaagaagctccggcgatcctgccggcaacgcggccgatgatagcgccgaaatacggaacaccatggaggtagccgtcaaggttgtcatacccgagcacgatgttttccgctttgccgtttttgtccggcacgatgatcttattgatgatgcaaccgtgttcaagcaccgttacagatatgccgcggtcatttttcaattcataagcatggaccggacgcccttccaattccccaaacaatgcctttttgatttccattttgatcatcccttttccgttaaagattgcgggccataaaaaacggcccggtgtacccgtctgagctaaaagttacggaatgtgatctgcagccctatatgcgtcaaaaacgtatgctaaaagtgttggaacgcgttgccggctcctgttccccgcggccgcgccaatcgcttccggaatccgcagccggcctgaatgccaagtaaaaaaccggcctgctgtttggtgtgcgcggtacattccggaaggcgtttagcagcccgcaccctttcaccgtgaacatgcgcaaaaaaaaggttggaacggaccgcctacaacttacgcaaaaaattccggaatgcctgttttcctctttcgtcccgtttaaagacgccggcgtgctgcaaaacttgcaagaagactttgcccacttcgttgcggacgatgccttccacgttttccgctgccaccgtgccttcgtattttttctttaaaccgtttgcccagtcaagatggtaggcggcaatggcgttcgaatgcccgagcaaatatttctccacttcggccagctcatttttcagccgtgccggcagaaccgcaagccccatcacttcaatcagcccgatattttcttttttaatatgatggacctcggcgtgcgggtggaaaatgccaagcggatgggtttcgcttgtccggttgttgcggagtacaagatcaagttcaaacctgtccccgcgttttcttgcgatcggcgtaatcgtgttatgcggcgccccgtttgtttccgcgaggatatcggcggaagggtcgctgtactgtttccagatttgcaaaatatgatccgcagcctcggtaagacgtgccgcctctgcactccgcagccggatgaccgacatcggccatttgataacggcggctttcacatccggaaatgccttcatttcaaaacgccagtcgtcagccgcttttgccatcgcaaattcataacgcccgccctgataatggtcgtgcgacaaaatcgaaccgccgacaatcggcagatcggcatttgagcccaggaaataatgcgggaaccgcccgacaaattcaagcaatctttgaaaagccgctttgtcgattttcatatcgcggtgtgtttctgacagcacaatgcaatgttcgttgtaatacatatatggtgaatattgcaaataccacggctcgccgccgagggtaaggcggataagccggtggttcgaccgtgccgggtgccccgttctgccggcatatccttcattttccatgcaaagcaggcatttcgggtaatggccttttttggcgtttttttccctggcaatggactttgggtctttttccggttttgaaagattgatggtaatgtcaagatcgccgtattccgttgatgtcttgtatacaatgtttttcgcaatctgcttcgtttggatataattgctgtgtttgcttaacgcgtaaaaataatcggtcgcttcagccgggctttccgcatatttttcccggaaaatacggtttaccgttgatgggcgcggtgtaaacacattcatgacgtggcttgcaaaaatgtctttctcatccagtatatcctgaatgatgcctttttcgcacgcgtaacggacaagcatgccgaggagatcaggaatatcctgatctgccccgcctgcttccggttcacggaattcatccagatgcaaaagcgacagcacctggtttctcgcatacacccgatcttcttccccgattaaccgagtgcggacagccttgtttacaagctgctcgaccgtttcaaaaattgccacaggtttcaccttctgtcgtcgtaaccgtttggatggctttcatgccagttccatgcatctttgataatctgtcgaatatccgtttttttcggattccagccgagcacacgtttagccttttcggatgaagcgatgagcgtgctcggatccccggcgcggcggtcgccgattttgacgttaaagcctttgccggtcacttcccggacggtatccacaatttctttgacagaaaatccgttgcttgatccgaggttgaacacatcgcttgcgccgccgttctgtaaatattgaagcgcaagaatatgggcatcaatcaaatcttccacatggatgtaatcgcggacgcatgtcccgtcttttgtatcatagtcttcgccgaaaatggtaatcgcctcgcgttttccaagcaccgtttccaatacaaccgggataagatgcgtttccggatggtggtcttcgccgatttcgccggttgatcttgcgccggctacgttaaaatagcgaagtgcaacgtatttaatgccgtacgctttttcacaccatttcatcattttttccatcgccagttttgtctcgccgtaagtgttggtcggaacggtcggcattgtctctgtaatcggcacgcggtccggttccccgtatgttgcggcggtcgaagagaacacaatatgcggcacatggaattctttcatcatttcaagcacaatttgcgtgccgtatacgttgttgtcgaagtatttcagcggctgttccatcgattcgccgacaagcgagttggctgcaaaatgaatgatcgcgtcaattttttcctttccgaacacgtcccgcataaaggcacggtcgcgaatatcgccttcgtaaaattttgcctttggatggattgcgccgcggtggccggtctgcaggttgtcaatcaccaccacgtcatatttttggtcgatcagttgatatacggcatgcgagccgatataaccggctccgcctaatactaaaatgctcatgcaagttcctccattgtgatttcttttgccccgtcgctgatgcttgcggtgtagaagtccgcccggtagccgatttctttttcatagacgtccccgacatttttgataaacgcatcgactttgtcattttcgacaattgcaattgcacatccgccgaatcctgcgcccgtcattctcgccccgagcacgccctcctgcttccaggcagtttcggccagcgtatcaagttctttgccggtcacctcgtaatcatcccgcagcgaacggtgggaggcattgatcagttccccgaaagcgggcaggtcgccacgttttaatgcatcaagcgctttaagcgtgcgcgcattttcataaacggcatgctttgcccgtttcctcacaatctcattgtctatgatttccttgtttttttcaaatgtttcttctgtcaaatcgccgagcgtttcgatatcgagtctcttttgcagctgtttcagtgccgattcacattccgcacgccgttcattatatttagagtccgcaagttcgcggcgtttattcgtgttcataatcaaaattttatggtgatccagcttgatcggggcatattcgtatgcaagcgtggcacagtcgagcaaaatgcccgcgtcttttttgcccatcccgaccgcgaactggtccatgatcccgctatttacgccgataaattggttttccgttttttgcccgagcttgacaagatccagccgttccacttttaggttgaacaatttttcaagcatcacgccggtcaatagttcaatggaggcggaagaagacaggccggccccattcggaatattgccgtacacgagacagtcgaaaccccgttctatttcatgcccggcttccttcaaatatttcagcatgcctttcgggtaattggcccagtcatgcgctttggtgtactcaaggttgtcgagcgtaaattcgatgacgcccttttctttaaaatttaaagatacaaagcggatgttgcggtcaccgcgttttttcgccaaagcatacgtccccatggtaatcgcgcacggaaacacatggccgccgttatagtcagtgtgctccccgatcagatttatccggcccggcgcaaaaaacgcgcgctccgccgccgtcccgaaatactccttgaaagcctgaggcaaatttgggttgctcatgttcgttccccctaagtgtaatagattgtaaacggtttcttcgttttcatcttacacgaggaagtaaaaaaatgcaatgttttttactaaaattttacctgcatcattcaacatctgaataatagagtttgaattcgatgtcctggtcgtggttgccaaaaccctttccaaaaatggtcgcgccaccgacatgttccgtatcttccagtacagcaatccggaaagtgatcaggctgtttcggagcggcaaatccgaaattttgacatccgacaggcattccccgtccatatacgtgccatactggttgatccgcaaatgtttcaaaaggccgtactggctgtggttgctctcccaccagccgggattgtatttgccgcggatatccgaaaagtttcccgggcacgtccatgtgccgaggttttttgagcaagaaacaaacggcctgctgtcatatacccgcaagccgaaaaccgccccggaaaatatcaggaaaatccttgaaaaatggcaggataaaaacgtacgggcttatccggcaaatcatagaatgtaaacgaaccatggagcggcaacggtgcaaattcagcacttgccgcttttttagcggcagcggcaaagcgggccaaaaaaagaggcggcgctttgctgctttgcgcccccctttcttcccggctatttagaccatcggatctttttgttttacacccgcgcgccgagctgcatgaggacggcatcatccatcggcggattgtgtaatcccgcacgcacatcccggtaatagcgctggagcgggcttttttcggacaggcttctggcacctacgatgcgcatcgctaaatcaactgcttctatcgcatgattcgtaaccgccattttcgctgccccaagttccggacccatctcttttctttgctccgctccggattcatcccacattttcgcaaccgaatacagaaaatgccgcgcctgcatcaatttcagctcgatttcaccgaatttctggcggatcgccggcagttccgcaatcggatggttcaggctgttcggcgtatacgatttcgcaaagcgagccgcttcccgtttcgctgcctcggcaatgcctaaataacaggccgggatatggagcagataaccagccggctctttctttttcgtctggatctccgccaggttcgcaagcgggactttgacgttttccagcacaacatcatggctgccggttgcccttaaagcaatgctgtcccatgtttcgacgacggaaaggccagccgtctcccgcggaacgacaaaactgccaaccgcttctttttccggaatcgttgcggtaatgataaaaaagtcgagcaccggagacatggtggcaaatgtttttctcccgtttaacacccattcgccgttcttttccgttgccgttgtttccggcatgccaccgcgcgtcgggctgcccgtttgcgcttcggttgcgcaagtgttgatgagggcggcctcccctgctgccgcacggcaaatgcgttcaaacaattgcccgttccatgttcttgtttcggacaaatgcatgaaaatccccatatgccacccgatggaaagggcagtcgacccgtccgcaaccgcgatggcctcttgcaggcggacaagctcatacagcgaaatgccgcccccaccgtagttttgcggcacagtcagctttgtatagcctgtttcttttaaatcttgaatattttcaaaagcaaaccgccctttcaagtcattggcagccgccctttcggaaaacgggccggcaagcgtttgaatcagttccagtttttcctccagcgttgaggtttgtaaaaaatccatatcctttcctccccgtaaaaactctttccttttattttaccggaaacatgcctgaaaaacatgacaacactttttttaaatttcctcttgcaatccggattttattataatataatttacattgtcctgattgattccatgctggtgtagcacagttggtagtgcacttcactcgtaatgaaggggtcggaggttcgagtcctctcaccagcatctttcttttttccatatggagaagtacccaagcggctgaaggggacgcactcgaaatgcgttagggcgggtgaccgtcgcgtgggttcaaatcccaccttctccgccatacataatgcatataaaaattccggaaaaactccggaatttttttgcgtttatgaaccacatggcaattcatgttcccaatccccgtaaaccggattcgggaatacgataaacttgcggccaaatgcatggcggaaacggtctgcttccaggctgcgcgccttgtttccttttgcgtcaaatgccttaaaaaagtcccctaaattatcaccgaataaggcaatgatgtcgtggtccttctcaacaacttgccggcgcgtttctttgctgcttgttccttgttgcaacagcacatgggaacggacggcctgcgggatcccttcttttttcaagttgcgaagggtggcatccatatatttttcgtcccggtttgaaatgtaataaatatcgattccttttttatcgacatattttaaaaaggaaagtgcccccgggagcggttttgcttttgcttttttcacccatgctccccagccgctgccaaacgaaatgcccttttctgccatataagataagtacggcccgttatccagcaccgtttcatcgaggtccagcacgatggcccgcttcttttttaccttggttttcaggctctcctccatacgctgttttccgatattgtatccttgataataaagcgctcttgcttccccagatgtccggtaccaggcaacccccattttggtctgttccgctttttgctttgccgtgcagcccgaaaccggaaccgtcttcatgacggcagcttcccggttttgtttgccgccttcagcagagcaccccgcatttccgagcaccagcgcaaagaccattagcaaccctgcaaaatagttcatgcttgccccttctttctaaaatgcttttacgtttagtatagaggaaccccggaaattgatacatgctaaaatggcatctttcacgagggtggccaacgttcacttttttccggattttacccgcacggccatcctcgtaaaagacataggcaaatttgatattttccacttgaaaacgcgaagtttccaatggtttggctgcaaattcaatgccgcgttcttctttcaaaattctattcacatagtcaagggtctccctgctttctgcagccggcacaacgataaatacgtgtttgaatttatttataaaataacgcgcctcattcgcacgcaaaccggccagcgccttcgcaacaggcgaagactccagaccaacagcagacacatttttgaaatcaacggtataggagatgcgcaattctccttttcctgaatggatttgattgttaacacaaaaatatatgaaacctattctatactcaacagttcacaatatttgtcatagctccccttaaggacaactcaaaaatcataactgatattttcgggcccgccgcccggcatttctattatagcaaaatggcatgcaatgaatgggactatgccagagtgcgtcataatgccaacagcatcaggctctgttttcaagagcctgattttgctggcatggattttgaccggctgcttgcaacctgtatgtaccgtggcaaatgccttcaatcctccgtggtgcttcgctcaaagcttccggttgcttacggtatgattgatcattctgtcccaccctttatttttttgtaaaacttttatcaaaacatagccaaaaatggcccctgcaaaagagcttaaaaagaaggcagggataaatccgaaaagcgttgacgcttggccgagtaagaaaacagcaatgggataacatgccaaggcaccgagaatgcctgtccccatgacctccccaacaaaggcaaaaatgagcttattcgtcttcgcgtacagataagctgccaaaaacgcgccgatcatgcttcccggaaaggcaaaaatactccctgtcccaagcaagttacgtaaaagcgaggatataaaagcttgcgcaaccgcataaccggggccgagcagaacagccgagagtatgttggcaaaatgctgtaccggaaaaatttttgcaaaacctacggggatataaatcaagctgctggatgcagttgtgatagccgcaataactgcagttgctgttattttttgtgtttttctcattagaaccaaccctccctcctttttagttgcgaatgaaaatcagaccggccagtcttgttttttatcgttcatatcccaaaataaatactcatactttgaggctatttggaaatggtgttctaagactgccagttccgtttctgattttccgcttgccagttggtccattaagtcaattaaccactgcgttccggagccgaacgtttctgaagaataggtttcgatccatttcttgtaaggattggtctccaatgtgtctcgatgatttaatttcagcagtttcccaatttcccaataatcccaggcacacggcaacaagcaggcaacaagttcagccaagcttccattggcggccacttgcagcatataacttgtgtaagcaagattggccggcgttggttgagttgcttctaaatccgtgcgtgtaatgccaaactcggcagcgtattggcggtgcagttccatctcaaaatgcaacgattcatggagaaccgcagcaaatctcgtcataatgtccaggttacccgctttcacaacacccatggcaaacagttttgcgtactcaactaaatatacgtaatcctgctttaaataatagataaatttatctctttctaaagttccgttccccagtcccacgacaaaaggatggttatggtttttctcccaaatcggctggacattttgatatagcctttctgtaaaagatcgtttcaacaatgattcctccttgtttaccgggaaaccgattgcggtttgcaggctggtttctccctttgccctaagcagcttcaaaataaaaaacccgccctccatcggaaagcgggtgtataaattacaaatcatcaggtgtaatttcattacctacttccctacgctagtacgaactagatcaggttctaagggtacttctcagccagccggcgcccctagtagacgattatgaatattcattttcaataatcttaccatatcatagtcccaaattttgtgcaacaggagatttatcatcctaatcttgattaaaatgtcgtcttccattaactttttaatatcgggacagctcctggaatatcaaagaagactttttctcacaaacaaggacgaatgacttggaaaccttgatttttcatcatttgtgccaatttcattcccggctttaagtggcaaaccatgtatcaaaacatggagaaatttgcagaacggagggcaaaaatgaggattgtgatcgctggcgggaccggatttatcgggcggaaattaacggatatgcttcttcgcgaagggcatgaagtggtcattttaacaaggaaagacaagcagccggcaaatcgtgtgcagtatgtaaaatggctggtggaagatgcttctcccgaaaatgaaatagggaatgcggatgtattcatcaacttggccggcgtgtccataaacgatggaagatggagtgccaaacaccaaaaacaaatttatgaaagccggatgtgcgcaacagatgaaatgttgcgcatcctgtctgccatgccgcgcaaaccggcagtgctggtcaatgcaagtgcaatcggcatctatccgccatcacgcaatgctgtgtatactgaaaaatcattgcaaagggcaaatgattttcttggcaggacggtatcgggttgggaagccaatgcgaagcaagcagaaaaacatgccatccgtactgtcttattgagattcggcgttgtgcttggaaaggaaaacggagcactgccccttatggtattgccgtataaatggtttgctggcggcacagtcggttccggcaatcaatgggtctcgtgggtgcatataacagacgtagtaagatcgatcttatttgctattaaaaatgagaacatccgcggcccggtcaatgtcactgccccttcgcctataacgatgaaggcatttggcaaaaccattggtgctgttttacaccggccgcattggcttcccgtaccttcttttgccttgaaactggcactcgggcaaaaaagcagccttgtgcttgaaggccagcatgtacgcccggaagtattcatgcaagcaggatttgaattcatgttcccgacgctccggcaagctttggaagatttgcttacaaatccataagggcaaaaaagtacaggcaacgaacgccacggcagaagggcccctcttcacacgcgcataaaaataaaggtctcccaacagccgtcttccgctgttgggagacctggtttcatcctgatggtaggtccctggtctttgtatttcatttcaacagatactagaggtacatggctatccatttgaaatctgatacgcttctttgcacccccagcctgaaaaatacatcattcgcgattttgattttctgcacgcgcttttactagactttccaaccttcattaccgttttcaatgtcatcaatggctggcatttccattcagacaccacgtccggaaaatgcgcatgaacttcaacccatttcatacatatgccccgcgttttatttttatccatcatgtacacaaacaaatactgtttggttatctgccgttccattttttacaaaaaaccttagccgccaatggccttgttgtaagtcagatcgaaatcaaaatttccttttacgccgttgatcttacagtttgttttacgatgctgccaaacgtcagcctgcatgccgagcgttgcgttataacgtgcaatccataatagattccccttgggcagtttcgatgcatttaaacgattcttgtaaaaatcgtagtacgtatagatcccagtatgttggaatcctttgcttttcaactcggtgataaaggcatccacatagcgggttaaagtatctttgtttttcgatagattctcgtattcgacatccacaaaaacatagccaatctgttgtttcacaggacttagcctctgcgcaaaatggtctgcttcctgtttcgcggccgttatggaagtggcgtcaaacatgtgataaacatgaacttttaaaccggctttggctgccgctttaacatcctggacaaaataatcctcggtgcccgtttttggcaaatcggttccctcacttgcttttataatcgcatagctaaaacccgccgctttcacttttttgaaatcaatcccgtttgtcccggatggttgcaaatatgataaatctattccccgtttggcgtagcggacaatatgggtatcgtaagtttgggcatatccgtaatagccgtctgcataaccaatggtcagccagtggccctgtttcgcataaacggtaaccggcgttgcgagataaagcgtatttttcaatgtttttcccgtacgaatgtcgtgcaaatacactgtatcagcagcatagccggtataccacgcctttggtctgccgtttgccacatattttttatacgcataggccgttttattttgaaattgaacgcggtaatagctgcccgacgaaccggtgacaaataccggtgcattgccgggcaaagtgccaacttttttgccggcgcttgatgctttcgaaacaaggttcaccgatctggttgcatgtttgacagtaatggaagatgcatgcgccttgatgaacaaaccatttgaaaaagtggggaatacaaaagcgaaagccattacaaaagagatcacgcacttaaatccaaatttgaccatcttgtccccctatgaatatatgagattaccttattctaacatttaatataagggctgtcatcgccagaatgatgctcaagtgctgtgagatatcaggacgtcctatagcagaatctgggtcagccatgagacgacccttgcattttttaaaacgatgctcaatcaatagcgtttgcttcgacattgacgggcactgattctggcccggcctaaaatagtagtaccggccactttccctaatttgccgcgtttcggcactgtccaggaaatggccgaaaatggttaaaaatacttcaatttcaggacttatatatcattttttcaggtgctctatagctatcctttgaggacgcctcacaaacacataaatattgttcaggatttagtaaataaaattgaacatccccctttcgatacattcccagaccttttaattttatgcctgaaaaaattggggaaagtaggcggttggtcttacccgatgccctgcagacgggtcaatcagctaaatagttgccttccatattgtccaccggtcttttttaacgatgttattttcctttgtcacctttttctggacataatcggtcagcaaacttagttctttatcatccagttcatacaaaatgcttcttcctgttctttcacttatgtcttttaataattgcgctttattttcgtgcacctttcttgtttcccataatttaacttcttcaatttttttgaaccctgcttcttgcaaagcctcgatgaccgtttggctgctatgcctgcgttttatttcctcatcaattaattttggaaataactcaaataaataccctctgatgtttgtgttatctccttctaataagcaatcatcgggtgtgcgatcttgaataataaaaaccccgccatcctttaacagtctgtgtgcttctttaaaacaagcatgcaaatcccaaagatggtgtattaacgctctttcaatcaccaattgaaagctttgactttctaagcctgtatcataagcgtttccgagttgaaaggagatatttttatagtctttacaattttccttcgctccttcaagaatcggttccgaaaaatcgatgcctataacagtttgaacgcccatatctgccagggctttcgaataaatccctcctccgcacccgatatctaaagcgtttgatatatgctcgacagttagcagacttttcatcatgtcaatccaggaacgatccgcaacacgggttgtataagtcaatcgattttgcttactgtgaaaatcaattcccatttcttatccctcatctctattgaaaaatcatattactctaaaaactgaacttagttttttacattaagaccaagtcatccattttacatcctaattgcttttgcaaccggtaacaaaatagcaatgtttcgctcattctctccagctttattttattatacctcattggaaagaaaaattcggaaaattttattacaaatcataaatattcattatagtcccggtaataagccggctattggagatttttgattttgaataaaaaatcgccctgattttggaaaggtgattttcacaaaatcagggctttttatcgttgctgtttacacatctaaaaccaaatgcgccacacattccacatgcaacgagcggggtggtttgatgtcttttacattatcggtagtcggaaacacgtcatctccactttttgcactatcggtaggcgggaacatatcgacatatataattataacgccaactactagatttgtaattggcgttataattattatgactttagttttgcttttaactcttttatttttgtttctatagttgatattacttttttaaattcctcatcactcttacctgtaggatcatccaacccccaatcttccctgtgtttacatggaaggtaagggcattccacattacaccccattgtaataacaatatctactggaggtatttcatcaagcaactttgaatgttgagttttctccatatctatatcataaagctctttcattagacgcacagcatcctggttaatttgaggttttgtttctgtgccagcagagtagctttcaaatatatctcctgcaaagtgcttaccaagtgcctcggctatttggcttcgacatgaattatgaacacatataaatgcaacctttagtttattactcattggccatacctactttcttgatttttctggaaaccagtgtcttgtattattcgctatctttactaatatcaacataacaggcacttctgttagaactcctacaatggtagcaagtgcagctgggctttgagttccaaacaatgcaatcgcaacggcaactgccagttcaaaaaagttagaggcgccaatcatgccagcaggcgctgctatctcatgaggaagttttatagccttgcttgctagatatgcaatgaaaaagattaggaaagtctgaataattaatggtatagcaattaaaacaatatgcagtggattattcagaattacatcgccctggaatgaaaagattattattaatgttagcaatagacctatggtggtgacattcccaaacttcggtataaagctattctcaaagtaatcgagtcctcgcctttttgtgatgtaattacgggtaattatgccaccagctagcgggataacaacaaacaatactacagataaaataagagtgtcccagggtatggttacgccgcccacacctagaagaaacgcaactataggcgtgaaagctatgagaattataagatcatttgttgccacttgcacgacggtataagctgcgttgcctttggtcaaataactccatacaaataccatcgctgtacacggtgctgctccaagaagtattgctcccgcaagatagtcttgtgccaattctgccggaattagagatttaaaaattacaaagaaaaacagccatgcaatgccgaacatagtaaatggctttatcaaccagttggttatccatgtaacaaaaagtcccttgggatttttgcctacatttctaatactttgaaaatctacttttagcatcattggatatatcataatccagattaaaatcgccattggtattgatacatttgcatattcaaaacgtcctaaaaacgctggtattccaggtaaaaactttccaatcaatacccctgcaaacatacataaaataacccatacggttaagtacttttcaaaaaatccaattccactattttgttccttactcatgttaaatcaatcatcctttctttccaagctatcaaaaaatgtaattaagttttgtgggatttcatatttctcatttgtcaaggggattgaaccatggccactataaacttctttcaaaattgcgttgataatcatggattttggaggttccgtatactctataccatcctgcacccaaaccctgcaatccacagagtcaccacacagatccccacattccttacaggaagattccttaacctcaagagcaatatccctgccatttacacgaattgttggagaacttaaaaaatggtgtttaatggctaactccctcgaatttatattaatcttattaactactatctcaaatcctgcctcacttaatactgtagatacttcattgactgcatcatagaggttagtttcagttccttgacacctcttacatacacttaggtcgagataaagaaaatcaattataatctgccttttttcctgttcttgtccgcagcaaccactgccacaagagcaacagccagtatcacttttattcatcacttttactacctccagagcagttcactatactttcaattgatgcatcctggaaccaagggattccaacaaagttatcagaacttatttccttaactttttctagccattgcttttcagcatcagcgcgagctattaacatactatttttagtattcgttaaagaaaggcactgattaaccacccaccatttattattaattcccgctctgtttaggtcatcactcagtctctgagcttcaaatactggtgttgcttcaggcaatgttacaattataacctctgtctgtttctcatcccgaagtcttggaagtaatctttgaacagataccggtgtttcacctttggttctctgcacttctctatggtagctctgtgtagagtcaagcaaaagaagcgtatgacccgttggtgcagtatcaataattacaacttcattttcagccttgtcaacaatctcagcaaaagctctaaatactgcaatttcctgtgtgcatggagagcgtaaatcctcttcaacataagcaatatcatcttcgctcattgtttcacgagccttacttaatacctcattttgatatcgcaataattccttcttttcatcaattttgcttagttttatattttcagtatcttcaaccacatatttgagatgatcagctggatctgtagatgttaaatgtgccttaacaccctttctagcaagagccacagcaatggttgcagcaatagttgtttttccaacaccgcctttgcccattgtaaatatcacttttttacctgccctataaatatcttcaatcagaacatctaggtgtcttaaatttaaggatttgctataaatactattttttgtgtattcgtcactatataaaaatgttctaatattatcaatacctacaacgttataggaacgaagtggtatagtgaaaatcttaaacttttttaaaccctgtggcatattttccaaagccttttgctgcttatctaacattttaatcgaaacatcgtcagttgcttcactcagtataccattgataattaaaacctgattgtttatccctagctcactaagctcatggcttgaacgttcagcttcaatcaaaggagtttcctccggccttgataccaatatcaaagttgttttatctttatctgcaaggttttcaaccgcattcttatacatatcctttttatcttgaagtccagctagctgacctaaacatgacgccccatgtgtactttcactaataaaattactccacgctgatggtaattgcagcatacgaagtgtgtgccctgtcggagcagtatcaaaaataatataatcgtatttattctctgtggatttatcagtgatgaagttcgaaaactggtcaaaagcggcaatttcaactgtacatgaacctgagagttgttcctccatatttacaattacactagccggcaacttccccctatatggagcaataaccgattccctatactctctggcagcttcctctgggtcaagattcgccacaactaaacccggcactccatcaatcggcacacctttgccatcaagctcagtattaaaaacatcctgtaaattggatgcaggatcagtgcttataaggagaacactttttccattatcagctaaatttactgccacagcacaagcggttgaagttttacctacaccaccctttcctgtgaaaaacatatacttagtcagatttatcccatctaaactaaatggctcataattattctttaacatcttaacagcacccctttggtccgcagcagccactcttcttttaaggttttgtgcttatttccacccctaaccattctgaaaactcttcgtttgttgggtagcttttggtttttacaatttcaccatctgccagtgttacaggaagaatatctgctccttccttttgtagaatttcacttataactttattggagataaaatcctggggttcactagacaaaccatgcctttttataataatccctttttctttaagcgaattaattacagttgctactcttaacagctccggatcaatagatggaccacaaactcctgttgagcaacacattgctgggtcaaaaatctcaatatttttcattactaaatcctccttaacaacattgattatcagattttttatttttgctctttttacaaatacaatcttctttgtcatttgttatgcatgtaaagaaagctattacctcatccgtttttttcttgtttaatgtatatctcatccatgccccatcacgtactgcatttacaagaccactttcagataatatcttcatatgataactaagagtggattgagaaatactgaattcttctaatatatcgcatgcgcacatttctccacacgatagcatatcaataatctttaaccgtgtttcatctgacatagccttaattgcaggaacataatctgcatatgaatgtttcatgaaattacctcctatatattcatatgtatcaatgacatcgaatgttctcgatatcttataataagaatatcaggcatatcgatagttgtcaatatggttttataataagttaacgacaaaaagcgccgactaagatgccactgcacctcaatcggcggtcaaattcgttttatttttctatatcaatttctacaccagatttaaattcaatagttagtttatcatcatagaccgttattttataatggacccataaaacgacgatggggtccacctttgtcgtcttacaaggcagtcgtatagaaactatagattctgagagtattccacctggaattaaagaacgcagacaaaaagccaaaatagatgaaaatggaatacttcaagaaaacatcttacttcgtagcccatcatatgctgctgcctttgtcattggcgggcacgtaaatggactggtagaatggaaaacgaaagacggggtatcattgaaagaaatagaaaacagtgaagaaaattaagcggaaatttacatccatcctgtctcctcaaccctgttaatatatctaacctatcaactcaaccctatcactttcaaggcagttgatatgttaccgcaaacaataaaaataagggttttctgacattatttcttccggcaaagtaaccgtgagaaaaacctaatgtctggaaaccctttatttatcagtatttttagtagagctacttctcaacccttgacatcaataccacgcactcaacgtgcaccgtatgcggaaacaagtccaccggctggacggcagtcagtttgtagccaaacggttcgagttcttttatatccgttgcaaatgtgtccgggttgcaggagacatagacaatgcgcgcaggtttggcccggccgattttgcgcatgactttgccgccggcgccggaacgcgggggatcgaggagcagcagttccgggttgccgaagctttccagcacttcatcaatccctttgcgcgcgtctttggcaaggaaatatgtgtttgaaatgccattgtcttttgcattccgtttggcagattcaatcgaggtttcgacgatttcaatgccggcaagttccccgacacggtccgcaaacggcagagaaaatgtgccgacgccgcagaacaggtcaatcattttttctgttttctccggccggcccatttcaagcgcaagatcgacgagtttctgtgcctgtaccgggttggtttggaaaaatgtatcgaaccatatccggtaacggtaaccgcccatttcatcgtaaataaaatcacgtccggagaggacatgtgttttttccgcctgtgtccggtctgcccaatcggtattttcgagccagagcaggctttttacttgcgggaatttgccggtgatccgttctgccaaatcgcgggccgcttcagccagctccccgtccggcgcttttgttgcaaacagggcgagcatcatttcccctgttacaaaagactggcgcaccattaagtggcgtaagaggccttcgtgcgcatctttgtcatagccttttaagccatgtccttttacccatgcggccacttccatcgcgccatccaccatttcttttccggcaatcaggcaggtttcaagcggaatcactttccggaaattcccttgctcatgcaggccgagcgatccgtccggggcaaatgtaaattccattttattgcggtagtgccagggattgtccatgccgatcgtatcacggacaagcgccgggtcaaagccttgtgcggcaatggcttcttttacatgggcagttttttgctttaactggccctcgtatgcccagtgctgccagacacagccaccgcaccggtcaaagtgcgggcacattggcgccaccctttccggatgggcttcgagaatttcttccggcagtgcctttcttcttcttttttccggctggtccacggtgacgcgcactttctcccccggaagcgtacgcggaatggtcagttttaattttttcgcgttgccaagttcattttcacgccagacaaccgcctgcccggaaccttttgcatccaggtcgcggatttccgttatcaatgattccccttgcaaaatggccaatccaatctctccttccaatgaaaaacgaatatctcaacacatttgatgtgtaaagttcttatattcaaaaaacggggcgtttcactgccttgtaatagtataatggaaaaaaagcggtttgcaaatgtgcattgcgcaccggcaccaccccgtaagcaaaaacaaggcccgtgttctcggcttatccacgggccttgttttgctttctcatttccagtattctcggcagtttgattgccagatgttcacggcattttcgctgtttttcatatatataatctgttgctttttcaatggaaacgagcttattgatatcatcttcctctatatcgagatcaaattcatccgataactccacagccagctctgatagatcaatccagtccgcaccgagatcatcgacaaaaagggtgtcgtcctttatttccgaagggtcatcatcgaaatcgttcaacacaatgtcgcgcactctttcccggatattttcttttgaaatggtttcccgcatcatcatcagctccattgtgtaaatgtgaacaaaatatttctcaactacttttaataatagccattttacaacgccagcacaagaatgcaatatcccggcgctaacttttttatgccaaatttttcctaggaaagggcgctgcatttttgggatacgaatgtacccggacagcttctctacaaatcaagtgacaaggcccggtgcaaatactaaaatgatattagtgtaaacggattccggcggtaaagcagatgtgccattgctttatcccatatgtataatattgaacaaaatcgggatgccccggccattccaacttcagcagcataactgaaaatggcctctgcattttattgaaggaggaagatggatgattacatttgatgaacaaacgaaaactttccatttgcaaaatgatgaagtgagttacctcttacaagtggatgcattcggctgcgttgaacatctgtattggggagcgccggtcagggcctaccacggggggcgcgcctatccccgcatcggccgcagtttttccccgaacccgcccggtgcaaaagaccgcaaattttcactggatacggtgctgcaggaattcccgggatacggcaacggcgatttccgtgagccggcgcatgttatccggcatgcggacgggtcaacggtcacggacttccgctaccgggcgtatgacattttaaaaggcaagccggcgcttcccgggcttcccgctacttttgccaatccaaatgaagccgaaacattgaaaatcatgctggaagacaaactcacaggccttcaattaacgcttttatacaccatctttcgcgacttgccggcgatttcccgcgcggctgtgctaacaaacggcggaaacaagcctgttcggattgaacgtttgatgagcctgaatgtcgatttcccggccggacgttttgagctgttgcatctccccggcgcccataaacgcgaacggcaaatcaaaagagaaacggtaacggacgggatcaggcgtgtagacagcaaacgcggcgccagcagccaccaggaaaatccttttttggcgcttgtccggcctgaaacaacggaattccaaggtgaagcatatgcggtgaacctcgtttacagcggcaattttgccggaattgtgcagcaggaccagttcggccaggtgcgtctcgggatcgggctgaatgatttcgggttcagctgggcgttgcagccgggtgacactttttattcccctgaagcagtgatggcatacagcagagacgggctgaacgggatgtcgcaaacgtttcacacgctctaccgccgccatcttttgcgcggcaaacataaagatgcggaacgcccggtgttgatcaacaactgggaagcgacctatttccggtttcatgatcaaaaattgcttgaactcgccgacgaggcgcaaaagctcggcattgagctgtttgtgctggatgacggctggttcggccaccgggacaatgaccgcagttctttaggggactggtatgaatacgccggaaaaatccggatggggatcaaaaatctggcggaagaaatccataaacgcggcttgaaattcgggctctggtttgaaccggaaatggtttcgcgggacagtgaccttttccgtgaacatccggactgggcattgcaaattccgggccgcgggatttccgaagggcgctcccaatatgtgctcgattttagccgcggggatgtgcgcgaaaatattttccggcagatgacggatattctggatcatgtccatgtcgattatatcaaatgggatatgaaccgccatatgacagaagtccattccgccctgctggaaccggaaaaccagggagaaaccgcccaccgctatatgctcgggctgtatgactttttagaaaagttgacgtcgcgttaccctgacattttgtttgaaagctgttccggcggcggcgggcgttttgatccgggcatgctgtattatatgccgcaaacgtggacgagcgataataccgatgcggccgaccggctgaaaatccagtacggcacaagcctcgcctatccgccggttactatgggcgcgcatgtttcggccgttccgaaccaccaaaccggccgggttacgccgctatcgacgcgcggtgacgtggcaatgggcggcaatttcggctatgagttggatttgacaaaatgcacggaagatgaaaaagcagtgatccgggagcagattgcattttacaaagcacaccgtcaattgttccagtttggccagttttaccgcctgataagcccgtttgaaggcaacagcgccgcctggcaatttgtctcgccggaccggaaacataccattgcctattttttcaacgtactgtctgaagcagccggcccggtgaaaatattaaaactggcaggccttgacccggacaaaaactaccggcatattgaaacaggcaacatttacggcggcgacgaactgatgaacatcgggctgtatttgccattgtttaacaaacaggactttgcaagctacaaagcagagtttgaggcggtgtacgagtaaaatactccccctcttcccaggcagagggcactgaaaaacggtgaggcactgtgaatggcggtgtcttgccgttttctttttccccgcctattcatttttgttatgaatgggtataacaattttttattttcatttttttctctatttcagtatagtatacataaaacgagtcttaaagaaagagaggtcagctatggatgcattagtagaagcattccgttccattcctgccacctgcatatcagatgctatggatggtttgaataacttgcacccgcggattaagccattgaaatcgtcctattttctctgcggcaaagcttttactgttaaaatgccggtgggtgacaatttagccgtcttaaaagccattagaaatgcacaacctggcgatgttcttgtagtggacgcaaaaggagacgagtacagagccattgccggcgactttgtggtcgggatggcaaaaactttgggcataagcgggattgttgtggacggcgttattcgtgatatagatggtgttataaaactgaactatcctgttttttgcaggggcacaactgtggcagccagcggaaaaagcggtgttggcgaaataaacgtccccatttcctgcgggggagtagccgtaaatcccggggacatcatcgtgggcgatgcggacggagtggtggtggtgccggcagaaaaaggagaaaaaatattgcacaaagcacacgaaaaattgaagaaagaccagcttagggaagaatccgtctccggaaacaaagaagagatcatcaagtatttagactccatgatctcaaaatcataacctgcctctctctatgcacgcccggtttccatttgggctgttgaaccgcattctgaaaaaatgcagctgccatgcaaatagatgcatggctttgaggttaggtccactttattttgcgcgaaacattgttattttattgccggctgcaatcatcggcttggctccagtttgaaaactttagtctgtttttacacgaaatacggcggactggccaatgcttcatggttgatattcatttgccagtttcttgaacgcttcaagcgaccgttccactttctctgtcgggatgcagtaggcaatccggaagtagcccggaacgccaaacgtgtcagatggaacgagcagcaaatcatattcaagtgcttttttgcaaaatgccacagcgtcgtcttccaatgctttcgggaacatgtaaaatgtgccgccgggctttgtgatggaaaaccccatatcggccaaggcatcgtacaaaatattcatgttggtttcatagactgagagatccgccgtgatgtccagcacttcggcaacagcgagctggatgatcgacggcgggcagttatggccgatgccccgtgagatctggccgcacatattgacgatcagttccgcatccgggcagcccgggttcacggccacgtatccgatccgctcgcctggcagcgacagcgacttgctgaaagagtagcacgtaatcgtgtatggatgatatttcgcaacgtacggagcctctacacccttgaacacaatttccctgtacggttcatctgtgatgatataaatctcatgcccgaattcccgctctttttcctgcaaaatctgcgccaattcccggatcgtggcttccgaatagacagcgcctgaaggattgttcggcgtgttgattaaaacagctgccgttttgggcgaaatcatccggcggaacgcgtcaaaatgaatttgaaaattttccgtatcagcgggaacgacttttaacaccgcgcccgtttgattgacgtacggcacgtattcaggaaaatacggcgcaaacgtgagcacttcatctcctggcacggttaccgcccttaacgcgtgtgcaatggcgccggctgcccctgtagccataaaaatatgttctttccggtatggcaggccaaaccgccgttttaaggaatccgcaattttttcacggaccgaatcaatcccaaggctcgggctgtagccgtgcaccgccgggttttgcgcaagttccacgagtttttcggtaaaagcttgcgggaccggcacgctcggattgccaaggctgtagtcaaaaacattttcagacccgatttccttcgcccgtactgccccgtattcagcaatctcccggatgaccgatttctggccgagcatccttttgaattcttccgcaatcatgtttttcttcctttctgaacatctatcctatgtatagatataactataccatattttggccccgttaagatgaaattttctaaatttgctttcttgtttatatcgtaacagtgttgtgttatattaaaagcggaaaaggagtggcaaaaatggatgaagatttaatctccaaaaaagatctgctcgaacaaaccggcatctcctatgggcaattataccggtggaaacggaaaaacctgattccggaagactggtttatccgcaaatccacgtttaccgggcaggaaacctttttcccccgcgaacgcattttggagcgcattgaaaaaatccaggcgatgaaagaaaacctttcgcttgatgagcttgccgaaatgtttgcaccgggcggcgggcaacggatcagcaaggcagacatgctgaaacggggcattgtttccgattttgtactccatttttacatggaacaaacgcaggcgcaagaacaggcttttccatttgaagaagtgctcgccatttttttattggaaaaacttctgcacggcggggagatttcccttgaggaagggaaaatgctggtgcggctcttgcaggatgcggaaaaatcttttgcaacagaaggcacaaaggtatggctgatccggaagttcggcgtttccacctgctttttgacaaaaaaagcggaagacattttatttgatcgtgaagcaaaagtgattgtcaaccttgatctgatggagttatcggcagaattaaaaggaaaatggctataggaggcgggcaaaagtgggaaatcttgttataaacggagtcgcatcctcaaacggcgggacttttggcgacgtcatcttaaaaaacatttccaaccacggatcaccccttttgtcccccggcaatcctgttcttgaaacagtatgctttccaaatgaaaggcagtgcgatgaacgggtccttcatcgcactgcctttcgtttggtattacaggggacccaaccatgccgcatcctgtatacattttcaccttcggagggtacactccccaatgtatgaattgggttttcagccttttcccggctgccggagtgtgatgttatcaggatgcctgtcgtcggctccgttacagatccaaatctttgttaagatttgcttcttttaaagcttgtgccttaaaagatccgttactgatccggctttcctttgcctttccatattcttatgcctggaagttcattgacctttcatttgactgttcagcactttttctcatgaatgaattgctttgcggccttttcctttttgaaaactttcttcgaaaactttcaccttcggaaacaggttccccaattgctttcattcatgttactcaagtgcctggagtttccatgattcttcaaatcactttttcggcaatcgtttatgttccggcaaaaggtttgcttttcagctgcctgaacgggcggagtacattcgccaattcctttttcgtgaaccggttgcgctcaccgttccgggcttttcgaaatatacgcgtgaagacggaaccaatcgggatggttgagtctcctgcaatcccaaactttaagggctttccttccttacacttgtagtatagcacgggcatccggaaaaagctgtgtcgaaattgttaacgctttcaaattttgaaaatataaaagcagtgcgggcgaccgcactactttccgtcgttaaaccagtttatgcgcataccatttggcacctttgaagcggttcatgaaaatgagcccgcgtacgccccattcggcaatcatcgcaacccagatgccagtgatgccaaaaccgaatgtgatccctaaaatataaccgagtatgacccgcaaaagccacatcgacaacagcgaagccaccgatgtaaatgttgaatcgcctgctgcccggagcacggccggcataataaaactttgcggccataacagcggctgcccgactgcagaaatcaggacaatcgtaaagaccgtcggaataatcgattcaggcggattaaacagcttcatcatgacagggaaaaacggcaaaagaaccgctgacgttacgacataaagcagcgaagacataacaataaacgactttgcaaatttccgcgcgtcaacgatattccgccggcccatgcattgtccgacaatcgtgacaatcgcaatgctgagcgcgttcggtccaatctggaagagcagcgtgattgaacttgcgatcgcattttccgtcagcgccaatgtcccaagctgcacaataaatgtctgcgtcagcagtttcccgccgttaaaaaagatttgttccgccgcaaacgggatcccgataaacatcactttcttcaataatgaaaaatcgaggtgaagcgcattttttattttaaaacgaaccgactcattgtacttcatgacataaaaaatggaagcgatcatgccgaaaattcttgcacataaaatggatgtcacaaggccggcgacacccatatgaaaaaaggtaataaacacaacattgagcacggtgttcgttaagttcataaacagcgacaaaccgaggcatggctttgtatccccgacgccgcgcaaaccgcccagtaccgcctggaaaatcgcaataaaaggatatgagagacagctaccaatcaaataaattctcgcattatgaaaaacggctgcatctgctttcccgaacagtaaatttaaggtcggcgtgttgaatacaatcacaaacgcggcaagcacaacggaaaaaatggcaacggcagaaatggcctgtgtcgctgtttttgataccatttctttattgccaattcctttatactgggcaacaatcaccgttccaccggttgcaattgcgataaatacgttgacaagaaaaatattcaatgaatctaccatgttcacggcactgacagcactgacgccggcagaactgatcatcgccgtgttgagaaaactcattaagatcaaaaacgcctggtccaccaaaatcgggataataatgccaataacttcccggtaatctatagaatcccccgttaagtatctgttcaggtaaaaagtagacttctgcttgagtttgacagctttgatttccataagacctctcttcttcattttgcgggcttttttgtccgttctttttaatgcaacccatattatatcaccttaataaaaagagtaaagctttttcgcctggcgaaatttacgattttgtgaatggcaaattacccggaaaacaagcgccagcacgccaaatttacatataaaatatacttccgtttttccacaggaagaacaataactacttttacagtggggggaaaacggcaaaatttctttcattttatatgcatcttttattttgacgctctattgatacggtgatacgatggatatgtaaggggttacataaaatgggaaaggaagtatggttatggactttcaaaatatcacaatagcagggagcggtgtacttgggagccaaatcgcctatcaaacagcttttaaaggctttcatgtatacgtttatgatatttctgccgaagcaattgaacaggcgaaagaaagaatttccgggttgaaggcacgctacaggaaagatcttggtgcaacagaacaagaagtggacgcagcctataatagaatttctttttctgatgatctgggacaagccgtagccagtgccgatctggtcattgaggccattccggaagtggtttccattaaaacggacttttaccaaaaacttggaaaattggcaccaaaaaaaacggtctttgcaacgaactcatcgaccctgctgccaagccagtttgctgaagctaccggccgcccagaaaaatttctggcgctccattttgccaatgaaatttggaaaaacaatacggcagaagtcatgaaacatcccggcacagatgaaaaagtatttcaagatgtgatcgcgtttgcagaggcaatcggcatggtggcgctgcctttgtacaaggaacagccgggctatattctgaactcattgctcgtaccgctgttggaagcagcccaaatgctgctggtaaaagggattgccgatccggaaacgattgacaagacatggcgcattgcaacaggcgccccggccgggccattccagattctggatgtggtcggcatcaaaaccgcctacaatatcagtttggcaaaagcagaagctaccggcgatgaaatgtacaaaaaaattgcagacttgctgaaaacggaatacattgacaaaggcaaacttggaaaagaaacaggagaaggcttttacaaatatccttccgatgaatcctgatgtgacagaagggcccgcacaaagcggggcctttttattttgctctgctaaatgggcaaaagccatggacttaggctccagccaacatgcaagaatgcggaaaaaacttaattcaaaagccgcagccatggatagaaaaaaatcagcctatagcttacctatcgatggcaaactttgggcaaactttgcagaacttgctgaacgggccggataaaaagccaaaacagattcgtccagcaaaccctgtttaatgcacggcaactttctgcccgtggaaagccaaatattggacggcttccggcggggcgatttcctgcatcatgtcgacaaggcgctgatgatgcgtgaaaaagatgatttgcgtgcagctggaaagttcaagtaatatttttaatgtttcttttgaacgttcatcatcgaaatggacgaggatgtcatcgacaatgaacggcagcggctcgttttcagctgcgtatttttcaatgctcgcaaggcggagggacaaatacagctggtcggtcgtcccgtcgctcatcccgttcagcggtacattctccccaccgcgcacgcccattaaaacaggctcgtcctgctcgttgtaatcaacagccaatccgtcgaaagaatggagtgtcagccgcgcaaaaatgtcacccgcgcggtttaaaatcggattctgattctggctacggtaaaattcaatccctttttgtagcaaagctgtagcgagtttcaactggatatattgctcggtcaaactggcgatttgcgcatgcacgctttccctttcctggccggcttcaattgccgccatgttggcgccgcggatctgttcttcgtattcttttttgaccgcgccatattcctgctccacccgggaacgcgaagcttccaaacggtcaagttcacgtccagtttccgccaaatcggcgtctatcgagtctgcatcaaaccgggccgcctcatcaagcagttcctgcagtgatttaccggcacccgcatccagcatatccgcttcgatttgccggatttccttttcaaaactttttttcagcaggaatgctgtttcaatctgctttagttcttcgattgtgctgcagcctgcctgttggaaaagttcttttaaaaccgcaccggctgcttccagtgcttccgcttcttcttttctctcattctccaagtcttctgactggcgtttgagctttttcaaagcggcatcgtcctgtttggcattttgcaacagctggtacatccggtttacggcaacagcagcattttccccgtccaatggaagttgggccgtttcaaggatctgctgtactttttcttcaaagcgcgccattttttcagtgacggcttgctgttctttttcagtccggttgtatgcatcataaatttgcgtacaagtttcatagcgggcaagcagggattcagcaaccgccggtggcacctcttccaatattgccgtgcccgctacagctgaagaccaatttgccagccattcttcgcgtttcttcccgatttccgctctctccgctgcattttcttcccgcttttcttttaaatcgcggatggccgtttcaaggctgtccttctttgcggcaaggctgcggatttgtttcagttcgttttctgcaaggcttactagttccgaaagcggctgcccttctgaaacggcggcaaatgttttcagcacggcagaaagcgcattgcaacagtccgcacgactctcttggagcgcgcggattttttcctgcgccttctcataatcctgcatcaagcttttaatttgcgcgtgtttttgcagccattcccgcatctctgcaggggtaagcggacggatttgcgccggcgcccaaagtttttcccaggcggattcccacgcacgcaaagcttcttcaagcccggatttttccttttcaagctgttcttttttcccacggaacttttgaatatcggctaaaagtttattcttctcgccgactttttccgcctccagccgcatggtatcagcaatctggtcagcctcgcggacatgtttctcataaaccggcacggccggctctccctttgtatacgtttcagccgtttcatgccaatggccggtttcaagtttggtgcggatcaactgccagccggcatcccttaaggcgcgggccgccgacagcttttcttcggacgggatttcagcaattgaatcaagccggcggatgctttcttctgaagcttcgatgtcctcttccaaccggaaaatccggctttgcaccaattccagcttccgtgtcaattgttccgcttctttttcaaattttttcaccgtttcttccaaaccgggcaccggaagtttgacaagttcttcagccccgccatcccataacggcaaagcccggacggcttcttccacttgccggtgtttttgccggcattccgcggccagctcgtgtatcgccgcttccacgtcccctgcacggttcacctggttcagggcagcttcaagtttttcggcatccggagaatcaggcaaggcagccaattcttccagcttctttgccagctctttttccagtttttcgccttcccgtttgcatgatgcataagcctggtcgagcaacggcttctgcctgcacagctcgcggatcatttctttttgggcggaaggcagccggtaatgttctatattttcaactgccgcacggcccgggtcaatctccttcatcacggagatcaattgggcttggagctgctgttttttcccttccagctcaggcagcattttttcatcgtcttcgtactgttgcacttggcggtaaaggccggtaatcgcggcagcctgttccaaaatgtgttccggaatgctgatttctttcatttctgcttcggcgcgcgccagttgtcgggaaattttgtccaagtttgcccgggaagcgttccatttgttttccgtttctgcacggacttcggcaatattttccggaagatccgggacatcgccgagcgcttccaatttttgcaaaagattttcccggtttgcgatcttcggcaaaatccatttgacgcgctgcagctgttctttttggctgcgcagcgttttaatttttgcggtgaggcggccgagttctttttccaactcccggtaacgcgcctcaaaagctttccatgcctgtactttcagctgctgctcattgatttttttcgaaagttctttttcccgcttgagcagcttatttaattcagggacggaaccggtttttttgtacagtgcgcctgcctgtttgtcgaagttctcgagaacccggcgcagcacattgatgcccgaagcggctgtgaaaaaactttccccggcattgccgccgctttccaaaaggctctcgccgccttcacggagacggacatggtcaagggcaaacatatttaaaaactgggattcaggcatatggtttaaaaaagcggcgaccgtattttccgggaccgggttgccgtccgggccaagtgccgtattctttttcccttttctgcgggtaaactgcagagcttccccttttgtgttgcgcaaaagcccttcaattcttaatttcgtattgccatggaggaaagcgtcgttcgttttttgcggaaatccatataaaaaatgcgtaatcgagcggagtgttgtgctttttccggcttcattcggcccgaacagcagatggaagtttttctccggatcaaaggaaagcatctggtctgtaaaatgcccataagcaagcaggttcaaataatcaaatctcatgccttttccgcccccgtttccgttaaggagtaaagaatgaagtcttccacatcttttatccgctttttgatcaggccggggttggaaaaatcaaacccgtcttccccttctttcagttcatgcggaatggcctggcggatatcactgaactcatccagcagcgcttcaagcatctcttcattttcggccgtgctgcggataaattttagcaccgtcccgattggcgactgttcatcggaaaaggcatcggcatcgttcagccctgttgtcctgatttttactttctccacccagatttcgccgaaacccgtctcaagcgcaatggaacgcagctggttcaagaagaggtctttttttgcaaccagttccctgtgcatttttgttgcgccggccaattcaaaacggaccgccaagtaacgcccgtccgcttccgcatatgccttctcaagcgcgctgcgggccgcgtccatgagcccgtccgccgtttcgatgccgcccatgtcaaccgggcacaattgccaccggagcacatcaagcgggatggattccatcttttcaatcgcaccgtcttttacttccacataggtacagcccttttcccccgtctcgcggatatgccgcccctggatatttcccgggaacaaaatcgccgggtcatggggatggagcaattcccgcatatggatatggccgagcgcccagtaatcatactgtttctccatcatatcttctattgtgcacggcgcgtaattttcatgcccttcacgccccgttgcgctagtatgtaaaatgccgatattgaaatagccttcttttttcggcggatagtttttcacaagattttcttccactgcccgtgatgcaaaaccctgcccgtgaatggcaacaccaagcgcatcaagggtaaccgtttccggcgcttttaccggaaattcgtgcacattggccggcagtttcagagattttgtcatcaaattagccgcatcatggttgccgcggatgaggaaaacaggaatgccttctttctgcaggcggaccatctggcttgtgaaaaagaggccggtattataatctttccaattgccgtcatacaaatcgccggcaataatgagaaaatggacttgccgttcaatcgccgtatccaccaaatttttaaatgcttcacgggttgccccgcggattttttccaccggtgctccctcgtattgctccaggccggccaaagggctgtccaaatggatatcagccgcatggataaatgaaaaagacaaggcactccctcccgaatttaaaaacgagaacatttatttgctatttttattttacatggatggggagggaatgatcaagagaaaaaccgtttttctgaaaaaaatttatattttggtaatgctttttgcaggccgctgcagtttaaaataggctgccattttgggaagaatcacaatgtccgggtaactttgccctgtttcccatttggatacagaggcttttgaaacgcccatgtaatctgcaagctgttcctgtgcaatgcctttttcctttcgtttgcggataatgcatttgccaatattcagtccgttcatcctgttcacctcttacctccattgtatttccccgtcccacacctgtcgatagaggtaattgcgatgttannnnnnnnnnnnnnnnnnnnnnnnnnnnnnnnnnnnnnnnnnnnnnnnnnnnnnnnnnnnnnnnnnnnnnnnnnnnnnnnnnnnnnnnnnnnnnnnnnnnttaacatcgcaaaaagctccgatagattgtctgttgactttaatgaaaaaaagttaactaaccggaaactttatcataactcccgcttttcgtcatgcatgtcttggcatgctcccgttcacccagaaaagggcggacagttttagctgtccgcccttttctgatccgtccggtacacgtgcggctttagtcgcgggaggtgtacgctgcttttttggcttcttttatttttgcatacgtttccgtaagcatgactgtgtcctccacaagccggctgatccgcaagaggacgtcttcattgacaatttctttccggtaaaagtctttttcttcaataaaaacataagactggacaatttgggccctcatgtaagacaaaatcggtttgatctgctgctcggcaatcaaataatgtttcggtgagccagccgtgacaatgatgcttgccaccttatcccgaagtgatttttctggcagcaggtcaaacacatttttcaatgttgccggaatcgatgcctggaaaaccggcgtgccgatgataagcgcatccgcgtccatgacagtttgcgccacaaattttgtatccccttcataatccatataatggcgcccatcgctgaactgcacatcgtaatccgccagatcaaggagcgtgacttccgcgtttggatatttcccgcggatcacgtttaccgcgtagttcatcgctgttcttgttttcgagccgactcgcgatcccgaaagtgcaacaatcttcatttatgctccccctggttctttgctgtatatttttcaatgccggtaaaaagttcgccgcaatccgtatgttttgtctattttttccaaacagcatgccgccgccgggcaatctttcccgtactttacagcagactgccggcgttattcctgttatgccttttttcaaagcgaaggatacggcatggtaagtggtttcaccgttcgggacttgccatgtgccaaggccgattttcggaatcgccaccccattttccaatacaaaggtttcatttaaacatgacatgtgcaaaccgctcgtccccagttatgcatggcaaaattctctgattttatcaatctggaaccgtttttccggccggtcaaatctccgcaatcaggcattagccggaaactggccgagcactttatgaagccaggaaacgctcaggccaaaccattgcgccgcatctgcatccacattggctttcaatccgtttgaagtgtggggtttggcgagagacagcccgtgctttcccttttgaaaaatatgcgactcgaatggaatgccgtgtgcattcaacgcctgcataaaggcaatcgagttttcaatcggcacggtttggtcttcaaacgttgaaaacagaaagaccggcggcgtttcggcagtcacttccttgtcaacagacggcaccggaaaagcaaggctcccgctcatcgaatccaaaatacaagggtagcctaaaatcaatgcattgggcttatttttcccgatcgtaccgagtgcggcggcaagatgccctcctgcagaaaaaccggcaaccgcaattttttcagggtctgtatgccatgcccccgcatagtcgcgaatccgctccatggcttcttccgcatcttgtaaaaccgcttcaaaacggaatgattccccgaccgagtagcgcagtacaaacgcgttgaatccttccgccaaatatgccatcgcaaccggttccgcttccctgtccgaggtaaaccggtaggcgccaccgggaaaaataagcacacccgggcgcgccccgatattgctgaactcgggggatccgtccagtacgtacgccgtcagttcagcatcctgatgcgcctttaaacgtaaagtttctgtcttcacaaccctctcctcctcctgcccatttgcgggacggtttcatttttacagtagcaccggccattgcaaaaaacaatgaaaacgttcctgtatatcctgccccgtttaaaacaaaataaggtgggttcaaaaaatgaagtggaggttgaatcatgaaattagccgcacatgaactgtatggtttaaatgaactggcgatgaactgtgtcaactcgattacgaacatggcatatatgctccagcatgtccaggatccggcgttcaaaaaaattcttgaaaggcattttccgctccatatccgggactatagttagcccttttttacaatggtttttgcctatcctgcgtcattttaccgataaaacatactttacaactaggattaatcggtttaaaattacattaacattttaaattcactgaccgtataaacgttaggaaggagcttttttatggatgaaaactatcccgttctcccgggtgcagattccttttttataaaaggaaatgaaattggcattctcatctcgcatggattcaacggcaccccgcaaagtgtccgctttttgggaagggcaatggcatcggacgggtttacggtttgcgcgccaagattaaaggggcacgggacgcactatttggacatggaacgctgcacttacaaagactggattgacagccttgaagagggttatcagctgctgaaacggcattgccgcgatatttttgttatcggccagtcaatgggcggcacgctggctttgcatctcgcggaaaaacacccggatatccggggaatggtgtgtatcaacgcggccatccaaagcatccccgaactggaaaaatgcctggcgaaagggcggtatattcaagagggcccgccggatatcaaagcagcgggcgtgcatgaaattgcatatgaaaaagtgccggcggcttccatccgtgagcttctgtccgtgatgcgggaaacgcgggaaaacctctccgccatccattgccccgcactgtttttccaatcaacagaagaccatgtcgtgcctcctgaaaatacagattatattgccgcgcatatccttgccagccggaaaaaaatcattccgctccacaactcttatcacgtcgctacaatggatcatgaaaaagaatggattgcggcacaatgttcatcatttgttcaagaaattgcgcatatcgaatcccgtacggaaatatgatgagttttaaatcatgctccaaaggatgggaggatgcgcatttgaaaaattttctgcggcacgcgatagaaaaaaagcggcaatatttgatcgaacaactgattgcccttggcgcctatcgggaagatgacaagcagctattcaccctgacattgacggaacttgaaacagaatatgagtacttcagcaaaatcagccaggagaaagaagcgtcgggaagggaatagttttgccggcgcgtctttttttgtgttttttaaatgcccgaaaacgccctataactattccttaactattccttaactattccttggtacaccggcgccggcaattgcgcttgtggaaataaaaaagcaccgtttccattttgcgctgaaaacggtgcttttattatagggctttttccgaatcgggttttggctggtatccgttacgttgaaaaccggctttcgagtgcaaaacttttcctgcatttttcatttagtgaacgcggcgcccgcagaagaatgaaaattagccggcgcatatttttgggacaggctttgcagtgaagtttagccaaaacagacagagcctttcccggtacgggatgattgcttatacagcaagccctgtatggattataacagcccgacaatctgcaggccgtggggaatgcccctgtcttccacagattttgtaatgtatttggcggcggcctttaccttttcttccgcattccccattgccacactgtttttaatcatggacagcattttaatatcatttaacccatcgccaaacgcatattggcgttctggaggaaagcccaatttttcaacaatcttttcaattcccctcgcttttgacccgccttttggcaaaacatccacagagagcggatgccaccggataaattcaaaatccggaaacgcctgttcatactgtttctcttccccttctgaacagaacaggagcgcctggtacaattcccgccctttataataatgcgggtcatacgcaggaaaacggccaattttcaaagacgcaatgctcttttctatataatcgtggtttggcacattggctttcatgtcttcatggtccatatagacaagcggatgcttgtgggaaagggcatatgcagtcaattcttcaagggattgcctatttaacggatttttatataatacctccccgttcatgacgacatattgcccgttatagctcacaaacgtatccatcccgagttccttccgcaaatcttcaaacataaacggggccctgcccgttgcaatggctgtgacatggccatcgcttttcagcttatctatcgcttttttggttgtggcaggcagctttttctcatgtgtcagcaaagtcccgtctatatcaaaaaaaatcacgctttgttgtttcatattcttcctgatcctttcccgttctatttcaggcatactttttcaggctggcgttttttcattaaagatgctgtaatgacatcataaatcaaaaaactcagcagttcaaataaggtttccgttctttccggggcaaggccggcctgctttatatttttaaattcgggcagttcacccggcaacaagactgtcaaatcagccatttttgcaagggttgattcaggagaagccgttatgaccaccatttttatgccgtggagccgggcttttcgggcggcattcaataaagcgggattttctcccgattttgagctgaaaaggatgatatccccttttttaggaacaggcgaaattaagtcgccgatcatcccaacccggaaccccaaatggaccagcctgttggcaaagacaattgctttggccggttttcgccgatttttggttgccgcacgcattgtggtaggggcgtctgtcctgataattgcgccggctgtttttcgacacccggaccccaggaaatggaatgtgcgaaaaaagaaacaggctgcatgttataatgaaccatggcatatataggaaaaaagcagaaaaaagatggggcctgccatttggaggtggacacgggcaaagcaggcgcccgggttgattttttaaaaaaggagcacaaacatgttaaaagaagaaacatcacgaagcattacacctgaatacgatccgtgggaagcgtacatggacattgcgtcgcacgggaaactgactttgtcgaatatcgaattcaccacgactactttatgcaatatgcgctgtgaacattgtgcagttgggtacacgctgcagccaaaagatccggatgcgctgccgcttgatctgttgctcaggcggctggatgaaatcagcacactgcgctgcatcagcattaccggcggcgagccgatgctgtcgacaaaatctgttgaaaattatgttctgccactgttgcaatatgcgcacgaaagaggcatccgcacccaaatcaactccaatttaacaatgaaactcgaaaaatatgtgcaaattgcgccttatctcgatgtgctgcacatctcccacaactggggaactgtccgtaattatattgacggcgggtttgccaacatgcggatcaagccaagcgatcagcagggtgaaaaaatgttcaggcgcatcgtggaaaacagccgcgccttgtccgggatgggggtcatggtttctgcggaaacgatgttgaacaaacgcactttgccttatatggaacaaatccatcatcagattgtcgaagaaatgaaatgtgcaaggcacgaaattcacccgatgtacccaagcgattttgctgctgatctcgaagtgcttaccctggatgaaatccgggaggcgatccgccatttgctcgatatccgtgatgaaagcgtgtggatgctgtttggcacgctgccattttatccgtgcagcagcaatccagaagaccaggcattgttgaaaagattgtacgaaagcaaaaatgtgaccatccgcaatgacccggacggccgctcccgcctgaatgtaaacatttttaccggtgatgtgattgtcacggatttcggcgatacaccgccgcttggcaatatccgccatgacaggctgcccgacgtctttgaaaaatggctcaaaacgccaattgcaaaatcgctgaactgccattgcccgcaagccagatgcctcgggccgaacattttagtcaaaaatgcttactataaaaatattgattttacccaacgaaaagctgtcatcggcatgcagggcccctcttcccggatgggctgagaaacaggcgaatggggcgcgcctgccccatgctttctcgtaatctcaactacttttatcctggttattttccttcttttgcgttaaaatatgcagcaaagatgaataaaagcagcgaattgacttttgatcaggagggaatgaaattgggttggttgatcgggattatcattataatcgtgctcgtgcattttttaatcatccgtcctttgatcgagcggaaccggccgcaaattattgaaccgcgaagaagcatctacaacggggatgcctacgggccgcacccggagcaaaccggatggaacggtgggggcagctccggaatcggccggtttggcacgtttgccggcgggatggcaacaggcgctttgctgacgtatttactggaacagggcagaatcggttatgaccagttcgagcattttcaaaatcttgacggcagcgacctgctgcatgagctggaagagcaaaatattttacagcaggatgaaattgaccatcttgaggattcgttaaggaactttgaagacagcggccatgatggccatgacaatggggataatagagacaacggccagcaggataccggtttcgatctagccgatttcacttccaatgatgacaatgacttcggcggatgggacagcggatcggatgacaataactggttgtaagaagttaacggaacaggtgctcaaacagcctgttccgttaacattcttacagcggtttctaatagcgggtgtgcctgcattgctttatttccactcccgctccgggcaagacagatacattgctgcttggcgggcaatttgagttcattttatacaagcacctggggattcggattccattttaccggccatcccgcggctgctttacttacaaggtttacggtttgtactttttttcgctggatgaagtcgtttttttgtcatgatccgttttttcttcaagcttttcttctcgcaagtcttccattgggatcgggtcaactgtttgttcactcataaatttatcatgcatgtcttcgttttctgttgcaaattgttcagggttgtccattttccgttgcgatttctttttgttttcgtccatttcatatcacctcgtatggttcaatacccctttatttttccgaaaaaaactgaaaatatacgacgaacatgcaaaaaaaccgcgcctgcccatcccggcctgtcttccccaagggcggaaattttttgtattccttccatattctctgttaattgttgcaattttttatgatatgataaggttgatgagaagaaagccgatggagatgattttatgtttaatcgcattcttgtggcaatagacggttcaaaaatgagcgacaaagcactgaaagccgcactgaattttgcaaaagaaaggtttacaaaaatcggtgtgatccatgtggagaaaaatccggttattccggatgggatgccaaatgcgtcaatagataccctttattctgaacagcagagagacggagatgttttgttagaccaagccgctgctcttgccgaagaggaagaaattgagatagaaaaattttatgaaacgggcgatcccgctgtccagattgtcagaaaggcagaagaaggaaactatcagcttattattatggggagcagagggctcggaaatctgaaggggctcatgcttggcagcgtcagccagaaagtcacccagctcgccaaatgcccggtactgattataaaatagccctgcttagaagcctgtcctgaaataccggacaggctaatttaattgggcaaaagcctccataagcatactgcggacgcttaaaaagcccgggcaatcatacaaaatgccaggccggaacccgcatgtcccgttaaaaagtatgtttcgccggtttgcggagaaccaaggaaatttcaatttttttacaaatcgttaaataatgcatcatcatgataagcaatgttcccgtattcatggcaatgatgacaccggccatttggtactgtggatttgtgccaagataataaatgaggcagtacgtaaccatcgttgaccaaataaaatgtgcgagggcatccctgaccaggccgaggccgattaaaaatgcctgcatcggaatgacaaaatagtgaaacagaaaatacggccataacagccggacataaacggcggctgcagccgaatgggaaaacaatgtcgacagcggcacggaaaacaattgaatggcaatgacagccggaagcccgtaaagaaacgtcatcatcatcacctgctgaagcagtttctgcagcttcatgccgtctcttttggcataagcttcggaaaccgtcggaattaagacggtggacagggaatgggcaataaaggccggaaaaaagccgatcgtaaaagcgacgccggccatcagtccgaaatgttcgtttgccatcccctccgtcatgccggatttaagcaatacccatttgataaaaaacggctcaatcgcacttgttacggcatggaacacgcgcatgcccgttgtcggcaatgatacggaaagaaggctccttctgatttccttcccccccattggagcctgttcttttttcttaagcgtccgcatttgcagcacaaacatgtgaaaaagatacagcagcacaatcaggtcactgccaacaagcgtgcatatcgcaataaaaattgacatttgcacatcaaattccatccaatgaaacaacagagcaagcaggataagctgcatgatcttcctcaggaagttggcagcagcgatctttcccatttgctggacacccataaagtaacctctcgcaattgaggaaaaggcgatcatcgggatcagcgcaatgatcagccagcgaagatacgggtggtaatgatggaaaattggaagcgccggcagcaacaaagccactgccgccatgagcaacaggacaaacaaaactgccagccggatggtaaacctcagcatgtcacgatgatatttttcttcctgttccgcaacgaattttgaaatggagatgggcagtcccatgctggcgatggtgacaattaaaaaaatggccggcaaaatagacatgtacatccccatgccgtgcgccccaagttcatttgcgagtaccatatttgttaaaaattcaatgcactctccgatgaaagcaacgccaatcagcataaatgcccctttaaaaaacactgccatgttcttcctcttctccttatcaagaaaaactttttcaatattaaaggatatgaggcaagcctagagaatcattacaaataaatcaatagagatggaggaactcctgtgacagaagaaaatgtaattcgaaaaaaacaaacgctcgtaacaaaagaaagattagtagccgattttcgcaagctcgggctgaaagaaggcatggtggtcatcgtccactcgtctttaagcgcgctcggctgggtttgcgggggagaggttgccgtcattcgggctttaatggaagtggtgacagaccgcggcaccattgtgatgccggcccaaacagcgaataataccgaccccgccttttgggaaaacccgcccgttccggaagcatggtgggaagaaatccggcggaccctgcctgcttttgaccctgccattaccccgacttacggcatgggccggattgccgagcttttccggacgtttccgggagttttaaggagcaaccatccgaactgctcgtttaccgcctggggccgggatgcaaaatcgattttgagcgggcactcgcttgacttcccgttcggggaaaagtccgcgctcgcccggatttatgaccgggatggctgtattttgctgctcggcgtcgattaccaagtcaatacatccatgcatctcggcgaatcgagggccaagcatacaaaacggtgtacgcagagttgcgcgatgacgataaacggaaaaagggtctggcaatcctatgaagattacgaggaaaactccgatttattcaataaaattggccgcgcctttgaacgcagccatcaagtaaaaaccggttttattggcgctgccccgtcaaggcttatcaaccagcgggcgctcgtcgactttaccgtgcaatatttggatgatttatatgcagatgcggaaaaagctcaccactagttttctttttgtacgccggcaccggttccgctgcggaaatgggcgggcaccccatgcacggcactggtttcgtttttaaatagggcggacagatcattcacgcattttgtttgcagctgtaccgcctccgttgcggaagttggcgcaaagcatgcgcaccaattttagttgctttgctttacgcctccgccggcttcgttgttggaaaaaaggcaaaacccggcatggcacaaacttccttttgttccgtcttgcggaaacgggaaaacccgtcatgtgcctttgtttgcaccgggcggaatcgggcggacatgcctgtcttgcctcctgcctacgagccagtaatcgtcccgccgtttacatgcagcacctgaccggtcacatagctggaatcacgggatgcgagataaacataagtcggggccagttcgtacggctggccggcccgcttcattggcacatccaggccgaatttgacaacctgttccggatagaagcttgccggaatcagcggtgtccaaatcggccccggtgccaccgcattgacccggatcccctttctaaccagattttgcgacaaagaccgggtaaaagccacaattgccccttttgttgcagaataatcgatcaaatttggatttccctcatacgccgttacagaagtagtgaaaataatcgagctgccggctttcaaatacggcagtgcggcttttaccaggtagaaaaagctgtgaatattgtttttaaaggtaaaatcccattgttcattcgtaatatcttgcaaatcatgctgcacaaactgcatggcgtgattgttcacaagcacatccagatgcccgaatgtatccaccgtttgcttcacaacgttttggcaatgctccggatcttttaagtcccccggaatcagcaggcaacgctgcccgagcgcttcaatccttcgctttgtccgcccggcatcttctatttcataattggaataatacgggatcacgacatccgcgccttctttcgcaaacgcaatcgcggcggctgcgccgatcccgctgtccccgccggttacaatcgccactttattttcaagctttccagatcccttataagacgggtcttcgatcagcgggcgcgggtgcatcagtttttcaatccccggctgttccggctggtgctggggcggaaatgcatatttttgccggtaattttggtaacccggttccgtccgggaaaaatacatatctggcttgagccaatacaaatggaccacctctttatccaggctttttccgtttagtgtattcgcccaaaagccagtgggtgacaattaatttccttcatttgccggcaccttttccattacaacctcttcgaaatatgataggcgaattttatctgcattgtcaggatgctgccttcaaattagattctttgcctgttttcgttttttcgaacccattgcgatgcctttcagggagtttaaacgggttgaactaagttatataggatatgaaaggaatttaatccacaagtatctttatatatggataaaattggaaagcataaaaaagatcttttttatcattctaaaagtgtaacttaaattgaaggaggaatcacccatgactatcatcagtcaagtgaaacaaactctagccggattaaaaagtgcacaagcgagcttcgaaacctttgcactaggaaccgataatcaacaagctaaacaactttatcaagttgctgccaaacaaacacagcaactagttgacagcctttctgctcgtgttcaacaaattgaacaagaagaacctcaatacaaacaacaataatgtacaaattagataaaaaggttggttggatcaaccaaccttttttacacctttaaacgaaacgtaatgagtacatgtatctaaacggcaaaacaacaattgatatagtttaggatataccgaatatctgaatcagataaaaagaccagtactgaaaaactgtaatgaagcttgccttatcgggcaggctattccaatgtttatgatcatgattcttaataaagcgaggtggtttttgatgttgacggggcatcgtacttgggttttcgatcaaaagcccgccattatttctactggtacagttggtggaccttttgaagcgaacggaatgctggcgttagattttgatctgctccattccgatttatggctaggtcaagattcttatgaaaaagcccacaagatccttttagaagaagcctgtcaaaaagccatcgaaaaagccggtcttcaaaaagagcaaattcagtttttcctggggggagacttgattaatcagcttacccctaccagttttgctatgcgcacgctaggagtgccttttctcggtttgttcggagcctgttcaacatcgatggagggactggctcttggtgcttatattgttaataacaaaggagccgactatttgttaacaggtgcttctagtcataatgcagcggttgaaaagcagttccgttatccaacggaatacggtggacaaaaaccgcccactgcacaatggacggtaacgggtgctggagctgctttgttaagcagtgctggtgacggtcctagggttacgtctgctacgattggtcgtgttattgatatggggatgaccgatccgctgaatatgggaggggcaatggctccggcagctgtggatacgatagaagcacatttaaaagaacgaaatgttgacccctcttactatgatttaatagtgacaggagaccttggtcaaattggacatgatatttcacttgaactatttcataaacacggcacccctattcgcgaagaacagtatcaagattgcgggctcatgatctaccgggaagaacagccggtcttatctggagcgagtggtgcaggatgttccgcgaccgtcgtttacggccatttgttaaaccgaatgaaaaaaggggagttaaaacgaatgctagtggtcgcaacgggtgctttgttatcacccttatcctttcagcaaaacgaaaccattccttgtatcgcacatgctgtgtcgattgaatacgaaaaaaacgggccataaatggcatttttcttatctgaagaagcttttttattatattgacttctttggacaaaaaagctgtcaataaacggctgcgacaccaaaatctcaatttttgtatgggaaatcatttttcggtttttagaaaattttctctgttcatatgtaaataggagatgcctaaaactaaaaggtgtaaggagaggatacgatgaccattgcatcggaagtgaaacaatgtatggccagccttaaaggggtagaagctagcctgtccagtttagcattgcgcacccaagatgacgaatcaaaacgtacattacatgaaacgatgatgatcgtccatgaagtggtggaagatatcaaaaaccgtgttggagagttggaacgtgaagaaactcagtacaaagggttttaagatcacctattcttttgatggaggtgttgcgttgtgcccaattggttagatgttgtgatacggtccatattgtttatgattattctttttttaatcacaaaatggctggggaaaaaacaaatatctcaactttctttttttgaatatgtaaatggtatcaccatcgggagtataggagcagaggttgtgactggacttgagcaaaaaatctcattggggatcatagcgatcatcacttgtgcggctatcccttttttggcgggcctgttatcgttaaagagcaaagggttccgcggctttattgaaggaaaagggtcgatttttatcaaagatggaaaaatcatggaagacaatttaaaaaaggaaagatactcgacagatgagttgttggaattgcttagaaagaaaaacgtttttcaggtgtcggatgtggaatttgccgttttagagccaacgggagatttatctgtcttattgaagaaagaaaatcaacctttgacggcaaaagatttgaatatgtcggttgctacggtgaaggagcctcagacggttattatggacggaaaaatactggatgagccgctcaccacgattggccgaagcaggagatggctaatcacggaactggaaaaactgggagtgactatcgataatgtttttcttggacaggtcaattcctatggcgaattaacggtcgatctttatgatgataagcttaaagttccatctccgcaagaaagaccattgattctcgccactatgaaaaaatgccaggccgatttagagtcatttgcccttggaaccgaaaataaagaagctaaggaactatacaggaaaaatagcgaaaaattgcaaaaagcaattgagaaagtatcccctatattaagaaattagaacgtgtgtgaatgctaaactaaagtagaccattcctgctagataaaaatgaacacttttactgagtggatttaagtcaatatnnnnnnnnnnnnnnnnnnnnnnnnnnnnnnnnnnnnnnnnnnnnnnnnnnnnnnnnnnnnnnnnnnnnnnnnnnnnnnnnnnnnnnnnnnnnnnnnnnnntcgttcagcaagccctattttaaatttgcgagtgcttctttcattttatcaatcgcatgtatgattttttgaacagtgtagggaatttccagcagcgggcctgcgaggcgggctgccgcggcttcaactgctgcaaacatctggtcagcaaacgggatatgaaccgcgtcctttaattttaaaaatcgggatatatcgggtgagactgccaatagggccttttcagccaaccatttttcaccaatgtgcaggatttctttcagtacttgattttctatcgtgattgcatcaaaagcatgttggagctttgtttttctgttatcaagcctggtcccttctgtctccacaatctcaattgatttcttcaaatattgaaaagattctacgcatgctgcgaggatgcgcgtttccaatgcttgagcgagttgcccgatattgtccgtatcgatatcaattttttgcccctttcctgcgcttgctaccgttaacgtttcccctgtccaaacacttgccggaacccaagcatcagcgctgaaccggatttttccgtaagagacagtgcttttttggccgatcgtcactttttccatgggcatgccggtttgtttatcagcgatataaccggtgtgattgtttgcaaaccacttaaaccagctgatgccaaaatcaagtttgaccttctcacctggaagacggttgccaaaaccagcggcattttccagcaacgttaaagggtcataggaaccacagtaattggtaatccgcagtttatctgtctttttgcctttcatgccgtcggcaacctcttgcggcaatatggccggatcaagtgtgactgaatgaacgccctcctctacggcaacatagtttgcagcgcgccgcctaatgaattgccggcaacatggtcaatacggccgtacttctttttcattttacgaaaaaactgatcggcatctttaaactgcctgggcgttgcatccgataataccaagtccgcatctgtcagcacatcctggttatgcttttctttttgcgtgccttcgtagatgagggaaatttcatgtgttgccttattttcgactaccattgcatcgaggcctgaaggtgaatgattatagtaaatttgcttaacaatatatatatgatcgtttataataagtttatttttcttttgaggatgcttgtatatatagaatccgctcaatttaatcaaatcctgatcagaagtacgttttgtcatttcgccacttccccatttggttctataattacttcattgtgttctttatctgaatctttatattccttttcagttccagtacgcattaaaatatcattgctatttacggatattgaatattcacccggcggaaaatctttctgttttttcaattcatcttttatcttatctacaggcgttctatcagggttctcatgtttttttcgcatataaaatgtcatttctattatcatattgtcagaaatgaacttttgatcctctatcagtttttttaaactctggccgttaatttttggattatttagaaaagatttataagaatttaaaaactctaaatgagtcgtattcaaataataatatggcgtggcataaccggaatcaactgtattatccacagcttctttcgtcctgccaattacgggatattctttcgtaatcgccgtacagaaatcatccagcttttgaaattctttttcatacgccatgacatacaaacctgtcgtgattgcgccttcaacagagccctcataggcgcccacatcgccaatttttttgttctccaaatcaattccaacaatgacagaagtatgaaatttcgggtctttttttgattcagcaaatacgactgctgcgtccgttgcaccatatatctgatggacggtgatatctaaatggtatttttgcttaaaatattgcttgactttttcaataatttcgttccggtgctgtttggcaaattccccagtctcttccccgttatcaaacgaatatccctgccccgtgtaatcctgcaccgggatgtatgctgatgcttccgcctgctttttttcatccgctttatttggcattaagctgcaacctcctaacaaaagcagcatcatcatgatcattccgcttcttttaaaagccatgtcttcaccccaaaactaccagcatttgccccgccttaaacagcggggtggcataatctgtgaaaaaataatgccctcttctgtttcaaccctatccttggcaccgggggctacccggtgttttggaaccgtgcccactccccctctcccttaatgtaaacttcaagatcgtaagcccaaaatcctttaaaatatgtaaaccaattttatttttaagttgacatatatgccgcggttttttaatctattaatagataaaggaaaaaaggggagtgaaaaaatggcagcgaaaaaattccgtgccattgatctttgttatgcgggtatgtttgcagcgctgatggccatcggggcaaatattacatctattgcgccgtttcttgtcatcggcggggtgccgatcacattgcaaactttttttgccgtgctggcgggtttagtgctcggcagcaggcttggagcgatttcgatggtcgcctatatgctgatcggcttattgggggcaccggtttttgcgcgattcagcggcgggtttcaaaccgtattaagcccgtcattcggatttattcttagctttatccccgcagcctgggccacgggcaagattgtggaaaagcgccaaaacatggcagcgtactttaccgcttccatcatcggcatgattgtaaactatttgattgggaccaactggatgtacgccgcttataaaatatgggcgcaggccccgcaagcgttcagctacaaaatcgcctggatgtggatggcggtgccgctgccgaaagacattattttatccttggttgcaggctggctggcacaccggatcagagccgtttccccgcttattgcgttaaaacggtagaatggcccgcttatactgctccgcctgaaacggtgcaatcttcgggcggggcggtattccggagagggcatttctccgcttactgcgttaaaacgcggtaagacggcgggatcttttcaaatgcatacttcagcccccgcttacgattaaaacgagcgggccatttattccacttgctccatgtctgcccgaatggtgcatgcttcgggcggggcatactccagagcaggttccccttatcgcgttaaaacgataggggtcccttttgttacaatgacggtatgttccacttgggatacaaagcttccgtccggcgttacatacgtccagccgtcgcccgattcgaccacttcatcggcgccggtcgagacaaacggttcaaacgcaatgaccatgccgtcctgtaacaaacctgtatcgtccggatcatagtaatttaaaatatactcgggatcctcgtgcaaggccttcccgacaccgtggcccgtcaaattcaggagcacttcaaatccgctgctgtacactgctttttcaaccgcccggccaatttgattctgcttatttccggccctgatcttcttcaagccgctgtcaaacgcccgctgcgcacattcgcacagcgcaaataattcgggatctccctttccaacaacaaaagagatgcctgtatccgcataatatccatccagcgatccggatacatccacatttacaagatccccttcttttaacacgcggtctcccggaatgccatgtgccacttcttcattcacactgatacaggtgtacccagggaaatcatactctccctttggcccggagaccgccccgttttctgcaaaccttttgcctgcccattcatccaattctttcgttgtaatgccgggcctggctttttccttcagttcatcgcgaatgctggcaacaagccgcccgattttcttcaatccttccaaatctgcttctgacttgacgatcatgttgaacgttcccttctgctttaaagtcatgactccattatatagaaataacgttagatatcaaaatccatggttcatccgaacaaaaaaagctgccgcgccccgcatgccggatgctgccaatcttttcacacttttgtcgtatacgtaatgtttttgtaatattatttaatgtgagcgtaaccaaagaatagacaaaaattggtatagtgggattgtgagattcatagacagaggtgggaagtttgaagaaagtagctccaatattgcttgcgcttatgctggggaccggttttttactgcctgctaaacaagcggctgctgcatcctattccccgtcaaaggtcatcagtacggcaaagaaatatatagggacgccatacagatggggcggcacaagcccgtcaggttttgattgttccggctttgtaggttatacatttaaaaagaacggaaaaaacttgccgagaacagcagcaagcatttacaaaaaaggaaaaaaagtcagcaagtcaaatttaaaaccgggcgatctggtttttttccatacttattcaaaaggcgtttcacatgtcgccatttatatcggccataatcaagtcatccactccgtatcgcaaggcgtcaagatcgacaccctcagcaatccttattggaaaccgcggtacgtcggggcgaaaaggctttgagacaaaaaacttcggagagtcccgatgtttttttttgcccttttcctgcccctaccctttccctgggtatttaaacgcggatacgaaaaagatgaattaaaactttttccataaatcttatttttccctcccctatttaccataagaaacaaaaaatgctatgatcgtactgcaaatctattaaaaatttacagatttaggaaggggttacagcatgaaaaaaatttggtttgcactatttagccttgcctttgtgctcgcacttggcgcatgttccggaaattcgggccagtccggggcaaagaaaccggcaaaaagcgccacaaaaacggctttgatgaatttttacatggatctcaccaatcgtatcaacgcccaggacagggatttaaatacgtatgaacaggcgatcgctaagacgaacgacaggccgccgaaaaccgagcttgccaccatgcagaaggcggcgcagtcatccgcagaaaatgtgagaaaggaagtaaaaaatacgaaaatcccatccaaattaaacaactatcaatcggagataaaaaccgctgtaaaagatttgcaacagtcctaccaaatgaaagcggatgagttgaaaaaagcgaacccttcgctggatgctgcgaacaaaaagctggaacaagccaacgatgaactcggcaaagtatttaaaaaagccggcttgtcaccggccagcctcccggacgatgttaattcataagaaggttcaaaacacgatcgggcgattgccgatgctcattcaaaaagaagtttcaaaacacaaggcctgccggaaatcgatttccggcaggcctttcttccgcatgataaagcgtacagaactttgcatttcttcttctctaaagctaaaaagcagaatcattttcccgctttcggaatccgcccgcggaatgaagccaccatccgacaaattttccgcatttcaaaaaacaggttttgcccacatgcttattcgggatccaccagttcgccccgcttgatgtctttccgccccagttccacatgctgcgcttttgcgaattttttcaacaccttttcttctccgggcgtcacaagggagacaactgtgccggcgttcgaaccgagccggcctgtccgccctgagcggtggacatatgcggatacatcttccggcaaatcaaattgaatgacatgcgtaatcaccgggatatccaggccgcgggcagcaacatccgttgccaaaaggagcgggacatcgccattttggaacaaccggatgcttttttccctttcttccttgcgcatatcgccatgcagttcggcgacggccagccctttgaaccggagcttttccgctgcaaccgaaacatcccatttgttattgaaaaacacgagcccccggacccccatccgggcaatttttcgtaactgctcgattttgccgcgcgggtcgcccgttacgatataaatatgttcaaccgggctccgcgcctcctcttttgcaatacggatcaataggggttctttcatctggtctattgccttttgggctgctgcatcaggcagagtggctgaaaacaaaaggatctggcaatcgcgcatggcggattttacaatttgtccgactgtaaggctgtattcctttccgagcagctggtccccttcatcgagcaccatcattttcacttcatgcattttcagttttttctggcggatcaattcgaggatgcgcccgggcgtcccgatcacaaggtgcggatgtcttttcagtttttcaatttgccttttcacatttgcgccgccgatcagcgggatgctctgtattccgcttccttgtgaccattttccggcttcctcttgtatttgcatgaccagttctttagagggcgccaaaatgacagcctggaccgcttgttttccgggatccatccggtcgagcacaggcagcaggtaggcgagtgtttttcccgatcctgtcggtgccacagcaatcacatcccggccgtccagcacagcaggaatcactttttcctgtacaaaatcaggatgttcaaacgttgaatttttccatgcctgttgtaaaaaaggctgtaaatgatgaatgaatgtaggttccattgtttttccctgaccttccttttccagtccttttatcatacactaccccggccggaaaagaaaagagcccggttcacagccgggctcttaaaaaatcgtttatttttcttcaacgccttcaaaagctttgcgtaaaatgtcttccaattcgctgacaagcggcaatttcgggtttgcaggcgtgcattggtcttcaaatgcgcggtctgcaataacggcaacccgtttttcaaagtccgcccggttcacgccggctgctttcaggctaagcggcatattgaacagtttgcacatccggataatttcctggcaaaggctttcgacgccttcttctgtcgtgcttgccggcagcccgagaatacgcgcaatttccgcgtagcgctgatccgctacgaaatgttcgtatttcgggaatgccgcaaattttttcggcctttgcgcattatagcggataacatgcggcaagagaatcgcgttggcccgcccgtgcggaatatggaattcagcgccgattttatgggcaagcgaatggttgatgccaaggaatgcattcgagaatgccatccctgccaaagtcgatgcattgtgcatcttttcgcgtgccagttgatcgctcccatttgcgtatgctttcggcaagtattcgtgaacaagctggatggccttaattgccaggccgtccgtatagtcgttggccatgttggaaacataggcttcaatcgcatgggtcaaaacgtccatcccggtatcggctgttacggatttcggaacggtcatgacaaactgcgggtcaatgatcgcaacatccggtgtcagttcgtagtctgcgagcggatattttgtattgttctttttatccgaaatgacggcgaaagaagtcacttcagaaccggtacccgatgtggtcggaatgcagaccagctgcgctttttcacccagtttcgggaatttggcaacccgtttccggatgtccataaatttttgtttcaattcgttgaaatcaacttccggatgctcatagaacagccacatgccttttgcagcatccatcgccgacccgccgccaagcgcgataatgacgtccggctggaagcttgccattgcttcggcgcctttccgtaccgtttcaatggacggatccggttcgacttcagagaaaatttcacagtggacatagtccggtcgtttccgcaagtagtatagcactttctcaacaaatccgagccggaccatatccggatcggtgacaataaaggcacttgagatatccggcattttttccaggtattggaccgagttcttttcaaaatacacgcgtggtggaattttaaaccattgcatattgactctccgtttcgccattgtttttacattgtacagattaatgacaccgacgtttgtggacaccgagttgccgccaaacgtgccgcagccgagtgtcaaagaaggcatgtaggcattgtaaatgtcgccgattgccccttgcgaagacggggagttgacaatgatccggccggctttcatttttaagccgtattgttcaatgacttcatcgtttgtcgaatggatcacagccgagtgaccaagtccgccgaattcgagcatggcttctgcaaattcgaaaccttgttttgtgctgttggctttgtaacaggccaaaaccgggcttaatttttctctggaaagcgggtagtccgggccgacgcctgtaagttcggcgattaaaattttggtatcttccggaacatttacgcctgccattttcgcaatttcataggccggtttgccgacaatggcgctgttgacggattgcgtcttttcattgatgacggttttctcaacctttttcttctccgcttcattcaggaagtagcattgatttgcaatcaattcgtttttcacattgtcataaatttctttgtcgatgatgacagcctgttccgacgcacagatcatgccgttgtcaaacgttttggacaaaatcaaatcattgacggcgcgtttgatatcagcagatttttcaatatagcaagggacgttccccggcccgacgccaagcgcaggtttcccgctcgaatatgcggactttaccatgccggaaccgcccgttgcaagaatcagcgaaatgcccgaatgtttcatcaattgctgtgtcgcttcaatggccggtttttcgatccattggatgcagttttccggcgcgccggctttcacagcagcgtccagcatgacttttgcggcatggctgctgcatttttgcgcggacgggtggaatgcgaaaatgatcgggttgcgtgttttaatcgcaattaacgctttaaacatcgtggttgatgtcgggtttgttacaggcgtgaccccggcaataacgccgactggctccgcgaatttgacaatttcttcattattgttttcatcaatgatgccgactgttttgttatatttaatattgtggtagatgtattctgttgcaaacaggttttttgtaattttgtcttcatatacgccgcgccctgtttcttccacggccattttggcgagcaccatatgctgttccagccctgcaagcgccatttgttttacgatattgtccacttgcgcctgatccagttccataaattcacgcagtgctttttggcctttggcgacgagggaatttaccatttccgtgatttgtgcggatttgccaacaactttttcatcaattgccatgatcgtggcctccattctggtgattttgtgaagaatttcacataaaagggtaaaaaaataaagtttgtgaataatttcacatgattttctgctgtttttcaatatttcttttctttatggctctattatatgcgatttcacatgctatggctgtgccagattggtgacaaatgaataaatcatttataaacttttttctttcaaatattgctttccagccgcgattcaattaaaatagctttttcccgcctttttatattgtaagtgcttacattttatatttgtgtatttatgcagaattccgtatagagattgccgcaaaaaaaccgcttcccgcttgtgaaacatgcacattcacaaggaagaaacaaaaaaggagatgaattttatgcaaatccatctcccggatgtgttagaaatacctttttttccaaaaaatgatggctgtgacactggaaagaaccagagaggccaaaaacgccagccaaaaaccatgggggcttgattgccacggcaggccgtgaagattcattccgaaaaagctggataccatcgttggcagggaaaggataatcgtgaccgtcgtcaaaaatttcatcacgccgttcacgttattggaaatgacagaagcataggcatccatcataccacttaaaatattgctgtggacttcacacatttcgattgcctgtttgacttcaatcatgacgtcatccagtaagtccatgtcatcttcatatacttttaggaaatgctgccgtgtcattttttccatgacgattttattggcttttaatgaggtcgtaaaatacacgagtgtcttttcaaggctcagcagttcgaacagttcctcgtttcgcatcgattcgtgcaattcgcgttcgatcaggcttgatctgcggtcgatatattttaaatagtttaaataataacttgcaacttcatatagaatttgaagggtaaatctggttttcatgtaggtgtaaaacccgcgcacccgtctgtggataaactttccgataatcggattatcctgcaggcagaccgtgatgaaataaaaaggcgtgacgataatcccgagcggaatcgtatcatacagcgcggagtccacatcgtcctttaccttaacgggaagaccgacaatgattaaaatatcatcgtcttctttttcaatacgggagcgttcatcgacatccagcgggtctttaataaaatcggccggtatattcgtttgctggacaacctggttgatttcttcctctgtcgggttcaccaggttcacccagcatccttttgacaaagtttctgtttccttcagtttgccgttttcgtccgttaaatacatatttaacatgcaggccacctcctcttcacttttgaggaagctcaagcatactttactctcccagagactgataacctataggattggtcgaggccagtatgaagacttcctcttgcttatgtttcatgcacgacctcggatgcgcgtcagaatccatcagttatcatctcctttttcttcgattcataaatagctgcgaaacctgcaaccattttattataccacaatatagtatgcctgaatatgtccgcttgttattttttagccggtttatccgcctaaaaaactttataaaaataaaaaaagcaatataatgtcacatttgtgcatcatattgcttcgtgatgggacatgaggggctcgaacccacgacccgctgattaagagtcagctgctcttccaactgagctaatgtcccgcagatgacaatcattatattaccacaattccgggagagatgcaacgaaaaattttttcgcagccttaaattccagccatcatgaaactgcttcaggcagaagaacagcgaaagcttcggttccaaccataattggctaccccattttgaaacactcccaatctgccgtgcatttatcccggggaaaattttggccattttttgcggatttacaccaaatgatttgcgggcagcttcgctttttcggcaaaattttcgaggctgtctttcaatcaggggccgggaggatgactcgtcccggtccgattgattcttattttgcaggctttccccgggcaccgcgcatttttagccaaaatttcaatttggggcgccggattactcggccccggcccgaatggcagcccttttgcgcccgaagaggaggctcgccgcaataaacccggcgcatgaaataagaaccggaagcacaactgtatgcaatccgaacgggtttgggtgcaggcggtccagcaaaatgtacgagcccataccgagtatcatggaacaaaccgcgccgtacttgtttccttttttccagtacaggccgaaaataaccggccatataaatacggattccaggccgccaaaggaaaacaagttgagccatatgatcaatttcggcgggctgagcgacaacagcacgacaacggcggcaaccgctgcggtcacgccgaaactcgctactttcatctgtttttcggatgcgtccggcttcacataattcaaataaaggtctttgacgagcgcagaaccgacgagaataagcagcgcatcaacggtggacataatcgcggccatcggggcagcgagcacaataccggccggcactggcggcagcactttcatcgttaatagcggcataaccgtatccggcacttccacacctggtatgacagcgcgtgccatcacgccgataaaatgcatgccgaacataataaaaccaatgacaatggtaccgatgatgatcgccctgtgcatcgcccgggaatctttataagacatcgcccggaccgtaatttgcggcaggccgacgacaccgatcccgaccaaaatccaaaacgacgatacataggcaggggccaggctgtgcccatgcccgaacggcgtaatcaggtccgggtcctgcgcagcaagattgtgcataatatgttccatcccgccgcccgctttaatggttgccaccagtaaaataagcgtgccgagaaacatgaccgtcccttggaccgcatctgtcaccgccactgcgcgaaatcccccgattacgacaaacagcgtaacagaagcggcaaaaatcaggagcgacgccgtatacggcaggccggtcagcgattcaacaaggcgtgccccgccgatccactgtgccgtcatggatgaaaacagaaaaataataatgcttgctgccgccaaaatgacgacggtatcactttgatagcggccttttaaaaagtcaatcagcgtcaccgcatcatatttgcgtgccataatcgcaaattttttcccgagtaccatcaggacaaaataaccggttgaaagctgcgccatggaaaggagcacccagccaagcccctgcgtgtacgccacgcccgggccgccgataaagctgctggcgctcccgtatgtcgccaccattgtcatcgcaaggataaagccgccgagctgccgtttcccaagaaaatattcatgtacaaaagattgcgttttgatcacatattgattggcccaaaaaccaacggcaaaaataataagcaaaaaaatgagcagtggtgccagtaccggccagttcatggcttgtccccctcttcatcatcgaaaggaatatctttgaaaaagaacttcacaatgaagatgacaagcgccgtcacgacaatatagccggcaatgcagctgtaaaaaaaccatgacggcatgccaaatatataatggtactgtttggcaggccgtgtacctaagccgtaagcgaaaccgtaccaccagagaaaattgaacagcacaagcccgacgccgatccatgcttccttatgcgcctgtttaaatctttggtcatcttttttcaaaatgtgccatcctttccttgctttcgctactatcttacatcttttttcatccggccgtgtgatttttgccaatggacagggtttgttttttgcataaaagcagccggagcttcaggttgtatcccgcacccccttcacacaggtccgataaaaaacgcctgcgttcgcacatttcgcgaaacaggcgtttttaccggcagacccggcagcttcagatccggtcgttttggattctccattgcaaatcttccaaataccggagcaaatcatcgcgcagatcttcccgggaaagtgccatttcaatcgtcgatttgataaacccgaacttttcgccgacatcgtagcgtttcccttcataagcataggcatacactttttggatttcattcaattgttcaatggcatcggtcagctggatttctccgcctgaaccggtcttttgcaatgaaaggaaatcaaaaatctccggtgttaaaatataccgcccgataatggcgacatttgacggcgcttcctccactttcggcttttctacaaagcctttcacatcataaattcttcctttttgatcgagcgggtcaataatcccgtaacggtttgtttcctcgtgcgcgacttccatgacggcaatcacgctggaatggacctgttcataaacatcgatcatttgtttcaggcaaggcggttcagcctggatgatgtcatcgccaaggagcacggcaaacggttcatttccgataaatttgcgcgcacaccaaatcgcgtggcccaatccttttggttccttttgccggatataatggatatccacttctgcaggctggcgcactttttcaagcagatcaaattttttctttgcgatcaaattgtcctcaagctcaaatgcatggtcaaaatggtcttcaatcgcccgtttccctttcccggttacgatgatgatatcttcaatgccggaatcaatggcctcttccacaatatattggattgtcggcttatcgacaatcggcagcatttctttcggcattgcctttgtcgccggcaggaaacgtgttccaagccccgctgccgggataatcgccttcttgattttttgcatcatttgtcacctctttataaaacggtcaccgttctcctaaacccggcgcttcacatgcatctttcgcggccgtttccaattggtgcatcacttttggaagcagccgggaaaattcatgggcagtgagtgtagaggacccgttttcccggatccacaagtcggcgcatgccccgtgaatataaacggcattggcaaccgcttccttgatattagcatacgtgcatatatttgccaagagcatgccggttaatgtatcgccgcttccgccttttgccaggctgctgttgccggttgcatttacatagccgctgccatccggaaaagccatcaccgtgtactgcccttttaaaacgacggtgaccccgtgttcctgcgcataagcggaagcaagcctgatcctgtccgatgccatttgcccggccggaatgcccgtcatccttgaaaattcccccggatgcggcgttaaaacgaccggagccgtgcgtttcgggtatgcccttttatgtaatgcacccgcatcgaggacaacaggaagcggttcttttaaaacgccctgaatgaaagactccagctgcttatccggttcaatcccgggaccgatggccaccccggcaaacttctgccccaaatcgttcagccgctttgaaaaatccctttttaaataagtggcttcaggaacgagtgcggcaatcacattccgggcaccgctttccgtaaaaacggagagtttcccgatccccatccgcatcgcgccgatcgcagccaacgccgcgctgcccggcatatcgtcacttccggcaaccaaaagcccggtcccgaacgtgcctttatggacatttccgcttctttcgggaagcgaacggatgacatcttcttccgaccaaattttccattttgatgtatgcggcaggccgatttcgacagcctttgtttcgccaaaataagtggaagaagggaatagcaggctggacggtttcaatccatggagagaaaacgtataatccgcgtgtacggtatgcggatcggcatcacccgtatcccccgccactcccgtcggtacgtcaatggcagccacttttgctttccgggtattgatccaatcggttatttctgcaagatcatccctgagcggcagcctggtacctacgccaagtagcccgtctgcgatccagtcatactgtttctcacggtcaaaaggggctgcttcaaagccgcacgattgaaaataggaaaaatgctgcgcggcctctttcgtttgcggcggacctaaaggaaagatcaaatccgctttgtatccgttcagttttaaatagcgggcaagcacgattccgtccccgccgttattccccttgccggatagcaccgcaattgtgtcgcgtttggaaaggagcggcgcaagtgcccggtacaggccgcttccggcattttccatcagcgtaaacgtatccatgccgaaagaagctgccgttgcatcggcttccttaatttctttgcttgtataaatttgcattgccaaacacccccgttctcatagttttattgtaacactgcttgaatcgggccacattaaatttatgatttccgaatcctttttttgttttttccgtatatatgggagggaatgggttttatagacgagaaagaaaggggtggtataaatgaaacgaactgctgaaattgtactgagcgtcattggcgcggtgctaaacgggcttgccgcaatccttgtcttcttcggtacagcagccatgaaaagcgaaggtatcaaacaaatggaagcccggatgaaaacggatgcctccatcccggaagccgattttcaaacagcccttcatacgatccaggcactcggctggggaattgctgtggtgcttgtcatcggaacggcggtcggcattttcgccgctgttcaactgaggaataacaaaagtccgaagctgtcaggcattttgcttattatcggcgcaatgcttgtgttctttttcaccgtcggattcggggtgctcccggcgctgctttacctgattgcaggcattatgagcctcgtgcgcaaaccgccggtcatcgtttaatagagcataaagccttcctgcatgagggaggcttattttgatgcgaaaaaataatacggccggcgcgattccgcttttcatgccgcaatctcgcaatgaaaaattcggatgaaaatcccccccaaaaggacgcgggagcgcggcgtttgccggttgccatttcaagaatttacgtgtgtaatctttcccgccccttcctgttgagccggaaacggtgcacgctttaaaaaagtgtgataaaataaataataaatcgtttcaatattccgccattcaaaggaaccttgttcaacccgttctgtgatttcttaaaggagatgaaagagatgggtttattgcataaaggtgtcacgatattggcttttgacgaaacgtatgatgaacaaaaaagggtccagtcttttccccatgaaacaatcaatctgaaacatatccgccataccaatcttttttgtgaaaaagaggcgcttttccaaattgaaacggcactgggccgccgcaagcaaaaaggcatcacctttcttggaagcggcaattaccattatgtaacctccctgcttttaaaagaagcgccggaaccgttcacccttgtgctgttcgacaaccatccggacatggacgacagctttgaacaaacactgctgtcatgcgggtcatgggtttcctacgccttaaaaatgaacccgctgctgaaaagagttgccatcatcggcccgacttctttcataacacatcgccgcccgccgcaaaccgtccaaatctttccttttaacagccggaatcttgaaaaccggcaacggattttatccgccattccaacagataccgtctatatcagcattgacaaagacgtcctttccccggcttttgccgagacaaactgggatcagggggcgatgggcaggcaggaattgctgtcctgcatttcggccattctcgatcaaaaacaagtatttggcatcgatatatgcggggaggccgcagtctcgccggctgaatgctttctcccgcatgcgtttgaaatggtccaaaaaaacgacgccatgaatgccgcaattctcgaagtttgcctggagcggcgcccgcaaccagcactatacgtctgattctttttcttacttttaaaaaaagaaagacttgatcttcctctgtaatcatgctttaatgtctattatacaaagacatttgttttctgcaaaaatacataaagaggtgtgatcaaatgaaatcggacgtttcaatcggactgctcggactcggaaccgttggctgcggcgttgtcagactgatccggcagcatcaggaggaactcgtccaccagcttgggcgtgaagtaaaggtgaaacgcattctcgtgcgcgacatcgaaaaagaccgcggtgtagacattgatcccgcctctgtcactacaaatcccgatgagatattaaatgacccggaaattgatgtcgtcgtcgaagtgatgggcggaattgatgaagcccggaggtacattgtcaaggcgattgaaaataaaaaacatgtcataaccgcgaacaaagatttaattgccctctacggcccggagcttcaggaactggcctggaaaaaccagtgtgacctcctgtatgaggcaagcgtcggcggcggcatcccgattatcagggggctcacggacggccttgtttccgaccggatccaaaaagtgatggggatcgtcaacgggacaaccaattttattctgaccaaaatgatagatgaaggcgtttcttatgacgaggcgctgaaagaggcacaggaacttggttttgccgaagccgacccgacgtcagatgtggaaggcctggatgcggcaagaaaaatggcgattttggcacggctcgcattctatacaaatgtgaaacttgaagatgtggaagtggaaggcattacccatctttcatccgcagatttgcattacgggaaaacgcttgggtatacgatgaagctgatcggcatggcggaatgccaggatgaacatattgaagtgagcgtgcagccggcgtttatcgcccaaaaccacccgcttgcttccgtgaaaaatgaattcaatgccgtttatattaacggggaagcaatcggcgaggcgatgttttacgggcccggcgccggaagcatgccgactgcgaccgcggtcgtgagcgattgtattgccgcgattaaaaacatgcagctcggcgtgaacggccggaacctcaggggcccgcgctttgaacggaaactcatgccgtctgagcagcgctacgggcaattttatatccgtatgcatttaaaagaccaggtcggcgcattttcgaaaattacagccgccttcagcgcgctcaacatcagctttaaacggattttgcagacgcctgataaacgcgatgagcttgcagaaatcatcattgtcacccacaaagtgtcgctcgaccgtttccaaaaggcgctcgagcagttaaatgacatgcctgttgtcaaagaagtgaacagctactaccgtgttgaaggagaggcgtaaagacatgaatcaatggccaggattactcaagcagtacaaatcatttttacccgtcacagacaaaacaccagaactgacattatttgaaggcaatacgccgcttatcccgtttgcccgcttatcggaaaaactcggcgtggaattgtacggaaaatttgaagggttgaacccgaccggctcttttaaagaccgcggcatggtgatggcggttgcgaaagcgatcgaaagcggcagcaggtccgttatctgcgcctccaccggcaacacatccgcttctgcggccgcctatgctgcaaaagccgggatccgggcgatcatcgtgattccgagcggaaaaatcgcgcttggcaaactggcgcaggccgttatgtatggcgctgaaatcgtggaaattgacggcaattttgaccaggcgcttaaaatcgtcaggaaagtaagcgaaacttcgcctgtcacacttgtaaactcagttaacccttaccggctggaaggccaaaaaacggcagctttcgagatttgtgagcagctgggttcagcacctgatgtccttgccatcccggtcggcaatgccggaaacatcagcgcgtattggaaaggattcaaagagttcaatgagaaatttgaaaccggcctgccggaaatgcacggctttgaagcggaaggcgcggctgccatcgtccgggaccgggtgatcgaaaaccctgaaacggtcgccaccgcgatccggatcggcaacccggcaagctggaaactggccgtcaatgcccgcgatgaatcaggcggcgtgatcgactcggtgtcagacccagaaattcttgatgcgttccggctgctcgcccgcaatgaagggacgttcgccgagccgggttcatgtgcgtccatcgccggtgtcatcaagcaggtcaaaacgggacagatcaaaaaagggagcaaagtggttgctgtcctgaccggaaacgggcttaaagacccgcaaaccgccatgtcccaagtcgaagtccggcctgccgtgctgccggcaacggaagaagccgtgacagattatctttcgaatgtgatccatgtatgaacaggctggttatccgtgtacccgcaagcacggcaaatctcgggcccggatttgattcagtcggcatggcgctcaaccgtttcttaacgcttgaagtgtgcggcagcaaggaatgggtttttgaacaagtatcgccccttttgccgccgcttccggaagacagcgacccttttatcttaaaaattgcgcggcaggttgcggatttatatggcagccggctggccccgtgcaaagtcattgttgacagtgaaattccgcttgcccgcgggcttggcagcagcgcctcagccgttgtggccggcattgaacttgccaactttgccggaaatctcgggctttcgcttgcggaaaagctggacattgcctcgcggatcgaggggcatccggataatgtcgcggcatccctgttcggcgggctcgttgtttcagccgagcgcggggacggacggtttgaagtcatgccgttttttgacatcatggcggatttgctcctttttattcccgattatgagctgaaaacggaagatgcgcgcagagtgcttcctgatttttatgcgcggaaagaagcggtaaaagggagcgcggccagcaacctttttattgcggcgctcataagcggccagtacgaactggctggaaagatgatggaacaagaccgttttcacgagccataccggacaaaattgatccccgaatttttggagatccgcaggctggccaaatcactcggcgcatacggaacggtcattagcggcgccggcccgacggttatttcgctcgtaccgttcgaagaggcagaggccatggcagaaacgatccgcgcccatttcccgcatgtgctggttgaaccggccaaagttgaccgcaccggcctttccgtcgaaaaatatgcagcatccaatatgctgaacttgtaaaaaaggtttggagcctctccaaaccttttttatttccccaaaaatgaggcaagctctcttaacagttcatctttgtcttttttcaacacatacgaagagagcatctcccatttccgcgggcgcggcaaatgcaccttcaattcgtggatgatgacggacggctgctgcgacatgacaaaaacacggtccgatagcagcacggcttcatcaagatcatgggtaaccataagaatcgtctgatttcctttctcccatgattcaagcagccagcggtggacatccatttttgtaaaagcatcgagttttccgaacggttcatccagcagcataaccggcttttcacataaatacgtgcgcaaaaagctgatccgctgccgcatgccgcccgagagcgaggcgggatagtggccggcgtaatcttcaagaccaaactgccggagtacctccatcccccgcaaaattcgttcccgtttccgcaccccttttatttcaagcggtaggacaatgttttgcagtgccgtccgccagggcagaagcaaatcctgctgcggcatgaaaccggcggcatcctgaaccccgtccggtttgccgccaagcatcactttgccgccatccgccttttcaatcccggcaatgatatttaacagcgtgctttttccgcacccgctcggcccgataaaagcgcagaactcacctttttggatcgttgcggaaatgccgtcgagcacttttttccctccaaatgttttcgtaatgccttccaattgcaaatacgtcatggccggtttggaagaaattcgtttgtgtaggcagccttgatgttgatttttttcttaatgactttatggtcataaaggaagtccatataacggcgccacacttcttccttctgtaccccccattccgcggcatcgtcctggtacttcgtgctcagccacttctggctggcgcggacaagccctttatttgtatccggcacgtcctgaatcaggatatcggcagcctgttccgggtgcttgatcgcaaatgtataaccttgcgccgcagccttcataaaagatttgacaagggttttatcccctttggccagtttttcgcttgtaatgatgaccgggctgtaataatcaagcgcagggtcgagatctttgaccatgataagattcagttttttcccgttccgctctgcctggatgccgtcccagccgtaataaatccattcaaaatccgcttcacgtccgattgatttgaaaaaatccgtctggccgagcacgatattttttactttgctgtagtcggcgccgtatttttccatgaccgttttgatgacggcttcttcagacggcgaaccccagccgccgtaacgtttaccttcaaaatctttcggagaagtgatgttgtcttttttcaaagaagcaaagccggaagtattgtgctggatgatcgcggcaatggatacaatcgggattccttccgtccttgccgtggtgacattttcctgatagctgatcccgaaatccgctttcccggaggccaccatctgttcagccgtgatattgtctcccggctggataattttcacatctaggccctgcttttgaaaataatgttttgttttagccacatacaggccggtatgattggtgttcggaaaccagtccagcacaaccgtcaccttttgcaacgcttttttgctgctgtccttctgcccgctgccggcacatccggcagcaagcagcaacatggccgcctgcaacatgattaaaattttcttcattgatgatcttcctttcgatatacccatggtgcggatagcctttgcaaacattcaacagcgccgtataaaagaaatgtgagcccaatgatgacagcggagatggcaaacaagcgggcagtcataaaagattttgtcgcccttgtcagcatgacgccgagcccttcgcttgcgccgagccactcaccgataatggcacccatcacactatatgtaacggcaatttttaaacctgaaaaaaagtaagggagcacagccggaaatttgactttcatgtaaatttgcccttttgaagcatgcatggtctttaacagtttcaccaagtcatcatccaccgtttgaaacccttccaggatgctcaatgccagcgggaaaaagcagattaaaatgaccacaataacttttgactggagcccgaatccgaaccagacgatgaaaagcggcgcaatcgccacaatcggaattgtttgcgaaacgaccagtagcggccggaccagcatccggaaaacgggaaccatatccataaaaacggcaatcgctgcgccaatcataatggaaaaggcaagcccgatcaatacttcttttgcagtttgccaaatattgggccaaaccatccattgcagatttttcaattcctgccatacttccgtcggttttggcagcatccattcactgatatgaaagccggccgttaccccttgccagacgaagagcaaaaaaatgagccaggcagccgtgagcgccgtgttaacgaacaggctgcggcgcttgttcgcgatattttgcaattttttcatccattgtcaccccggtgcttggccggtaatggattttgatcgatgtgatgacatcaatcgcaccggcttggacgcaagcatcctgcgcttttttgatgatcccaagcagttcgtcaagatcgccttccatcgtcgtttccattgccccaacttcataacgtacgccggcgttttgaacaacttcgatcgcgcggtcgacgacaccgtataagtcatcacttttaatatgcggaacaactgaaaaagaaaccgttacttgattcgatttttccatcaaattttcctcctttttttcaaataaaaaagctttcattgcatgcgcaagaaagcctgtccatccaaaacatgccgaaacatgcttcaatatgagactccctacgctggcattatccagatcaggtgaagggtcgatgcaaaacggcatcctctcagccaaaaccggctcccctgctttttttcttgtaattttattgtaacatgaaaatcatcctttttggcaaacatttttcaattcttcaattccttagaacttccgggcctgcacaacgcccctcatttatgctttaaaggcagggattcccctgcatgccaacccaaagttccgactgttcaagcgcatatgcgacatccagcagccaatgttcatttcctttcggcgccaccagctgtatcccgaaaggaagcccggccgccgttatatggaccggcaggctgatcgccggctgcccggttaaattggcgagctgcgtaaatggggaaaacgttaagctcggctcaaacatttcatagacaagcgcctgctgcttttctttcgggagcccggtgacgccaaacaatcgatcccgctctttcccggtctgggtaagctccccgattttcggcgcagtaaaagcagttgaaggcgtaagatacagatcatacgtttcgtggaatcccgccatttgtgctgcggccttatcccactccgcaaggctctttgcgtattctgccgccgtgacatttttcccggcagcatacaagacccacgaaaccggctccatatctttttccgtaagcgggcgtccaagtgcgctttccaaatccgaaagttccgccgccatttccccgcagttcattaaataatagttttccatcagccgtctgccgtcaacgccgttttcggcttcttccacaagatggccctcctgctccagccattttgccgttttatagacagcctgttttgcgtcgcggctgacaggcgtcccgaccggcgatgcaaccgaaaatgcgatccggtattttttcgttccgctctgttttagttcctgtacatatcccggaaaaagcggcgtttgaaaagcagcggcgggttccacagtttgcagcacatcgaggagcgctgcactgtctctgactgtttttgccagcacgaagtcaatagccgccccttgccattgccgtccgcggcccggaccgaccggtgtccttccccttgtcggctttaatcctgttaaacttgtaaaagaagcagggatgcggatcgatccgccgccgtcgcttgcaccggcaaccggtaccatcccggaagccaccgcagccgcggaaccgccgcttgagccgccgggtgaaaaatggggattccacggatttcgcgccggaccgtaaagttcaggttccgtaatattttttaatccaaattccggcacgtttgtctgcccgaggatgataaatcctgcttccctcaattttgccgtaaaaaaagcatcttctctggcgcggttttgctgcagcagttttgatccggatgtgagcagctcgccctttaccgcctgggaaatgtctttgagcaaaaccggcacgccggcaaatggctgctcatctgtacggagcgcggccgcttccttctttgctttctcaaaccgtgtccggatgacggcatttaaacgcctgtttgttttttcaatccgggccattgccgcctccagcacttcttccacactcacttcttttcgctttatgagcctggccagttctgttgcatcatacgatagatatgcagatggttccatctcaatccctccattcaatcttatattgactgaattttatggagatgtcaaaacctgcgaaaaccgtttaaccctttttctaccgggtaaaagtgcactatcaccgttaggaggcagatagagatggcaaaagaagtagttggcatttacacaacattgcaggaaacgattgacgcagtagaccggttgaccgcagaaggctacagcacttccgatatttccattatttcaaacgggaatgatgggactttattgaaaaaccagaccggcgcaaatgtggaccacacctcttctgcccaggatgaacaaaacagctctctctgggagaaaatcaaagggttcttcaagccgggctattatgacgaaacgacaagaaaactgaccaatctcgatctcccgcaggacgaactggaccgctattcggccgaaattgatgccggacactatcttgtgctcgcagacaatgatgcttctgcccacaatgaatgggccgctccaggaacagccgatcctgccgcagaagtttccggccaaacaacaggatccggattgaaaaacgaatttggcgaaaactactccacgacgcaggagaaatctaaacaggccggccgctaagttgaaaagggcaaatccgcgcggaaaaggcgggtttgccctttttctttacgttgatgatgaaggatcaggcgtaacaggaagaatcgttttagcgatcgactggtcgagcgcttcaaattcctctaaagaaatcgtgctgtaaagctcttttctcgtctgcatgtcggaaagggcatttttttgcgtgccttcgtttttgattttttcaaacaccctttcataagcttttgcggcaacgcgcagcgaagtaaccggataaatgaccatcgcgtatcccatttccgcaaattcttccgccgtataatacggggttttgccgaattcggtcatattggcaaggagcggcgcttttatttttttcgcaaacagtcggaattcatcacgagactcgagcgcttccggaaaaatcgcatccgcccccgcttccgcatacgcctcagctcgcgtcaaggcggaatccagcccttcgacaccccttgcgtccgtacgtgcgacaactacgaggtgcggcgccacacttttgagcgcccggattttttcgcacatgtcggatgtttccacaagctgtttgccatttaaatgcccgcattttttcggaagctgctggtcttcaatctgaacagccgcaacacctgcttcgaccatttcgcgggcggtgcgggcaacgttcagcacgccgccaaagccggtgtcaatgtcaacaagaaccggtaaatcggtggcacgcacgagatcacgtgcacgctccgccatttccgtcgatgtgatcatgccaagatccggaatccctttgctcgcggtataggcagcgcctgataaataaagcgcctcaaaccctgtgttttttgcaatgagtgccgccattgcatcatgcgcgccggggatttgcaaaatgcctggtgcctgcatgcgttccttaaaccgtttggcaagcgcctcctgtgaagacggctgattgacaatccaaaccatggtgcaacatcctttctacaaggtgaataaattgacgaattcatgaacggccattttttcaagcgcttctcccgcaaggcaggcttctttgatcctttcctgctgcttcgcggaatagtgggtggcgatattatccgaaaacttggtgataattttcgggatcgcttcttcccttctgaagcggtggccaagcggatactcgacttccacattttcagttgatgtgccgtcttcaaaaaagacttgtacggcattcgcgatggaacgtttatccggatcaaggtaatcgatgctgtattgtttgttttcaacaactgccattttttccctcaatgcatcaatgcgcgggtcagcggcggctgcgtcttcataatcgtccgccgtaatattgcctttgatcaagccgactgccgtcacatactggatgcaatggtcgcggtcagcagggttatgaagcggcccttttttgtcaatgatgcggatggcggactcatgcgtcgtaattgtaatccggctgatttgatccagtttcccagctacaaccggatggagtttgactgcggcttccgctgccgtctgcgcatggaattctgccggatacgacactttaaataaaacgttttccatcacataggagccgagcgggcgggccagtttcagttctttccctttaaacataacgtcctgaaatccccaaccaggtgcggaaagcggcgtttgatagcccatttcccctttcatcgcaacaagcgcaagcgccacgcccctgctggttgcatcgccggccgcccatgatttgcgcgaaccggtattcggtgcgtgccggtatgtgcgcaacgggccgttatcaatccaggcgtgggaaacggcgttcatgatttcgtttttccctccaccaagcatttttgtcgcaacagcagccgtcgccactttgacaaataaaacatggtcaagcccgacgcggttcaagctgttttccaaagcaagcacaccttggatttcatgggctttgatcatggcctcaagcacatcgcgcactttgagcggcgctttcccattggcaacgcgcgtccggctcaaaaaatccgcaacagcaaggatgccgccgagattgtcagaagggtgcccccactccgccgcgagccacgtatcgttgtaatcgagccagcggatcatgcagccaatattaaacgcccccgcaaccggatcgagcacataggaagtgcctggcacatgcgtcccgttcggcacggccgtacccgggacgaccggcccgagcatttttacacactccggaaaacggagggcgagaatgccgcatccgagcgtatccaaaagcccgtaacgtgcagtctcaaaagcttcggaactcgtaatctctttgtctgccacataacgggcaatttcttctatcagggcgtcccgatcccctgttttttcatttacagcggttgtaccggccaatttaaacattcccctttccaaactttatctgcaggtcaaagcccggatcatttgagacagcgtttcaatcccggctttttgttcactttatctcttaatggtccagcctttttaaaacttaatcttgcggatgcaaaccccgcgggcctttgtattggacgcgcggacggaacaggcggttgttttcatgctgctccataacgtgtgcgcacagcccgaccgttcttgagctgaaaaagatcggcgtataaagcggaatcggaatgccgagcatccagtaaactggggctgcataataatcgaggttcggatagagccctttttcctgcgccataattttttccccggcttcgcacatttcaagcagcgaatgatcccctttttcctcacaaagttccttcagcgcttctttcatcatcagggcgcgcggatccatctttttcatgtagacgcggtggccgaaccccattactttttctttatttttcagtttcgtataaagcatttcttcgaatttttccaccgtgccggcttctttcagcatttccatcaccgcttcattggcgcccccgtgcagatggcccttgagcgatgccaccgcgcccgttaacgccccgtataagtcggacagtgtggaagcaatgacccttgccgtaaaagtcgaattcggcagttcatgttcgctgtacaggacgagagaacggtcgaaaatgcgttcctccctttccgaagggactttgccggtgatcatgtacaggaaattggcgctgtacggcaaatcctgccgcggttcaaccgggtcttcgccgtttaaaagatggtagctgttcgcgacaatgttcggcacattcccgagcaaatggtatgcacggtttaaattggctttgcgggaacggtccagcaggttttcatcataccccgaaagcgtcgaaacccccgtacggagcgcatccatcgggtgggtggatgccggcagcagcctcaaaatgtccagcacagcttccggaatccggtagtttttctttaaagtttcttccaacgcttttttctcggcaccgttcgggagcgttccttcgagaagcaaatgcacgatgtccagatagcttttctttttcgacaactcaatcaagtcatacccctttaaaacgatttcgccctgggccgtatcaagaaaagaaagctccgtttcaacagcgacaaccccttcaagccccggcacaaattgtgtcgtgtttcccatctccatccatcctccgtttctgtattttgccaaaactgtaagcacttacagttttatgtaaaaaaacaaagctgccaacatccctgatgctttcataaaaaaacatatcataatatttacaaaatgacaacgcccacaggctccggatggcgctgcggacggccctgtgcaaaaaggccggcttcagggaaattttccgtacgcttcctgccatttcccggaacggccaacaaaaaaagacaagtttaacctgccttgtcttttaaactattgctttttcggttttttcttaaaactgcgcttcacaacatcaaagaagctcagcgactggaccatccggttcgggtcaacatattggcggaccgcccgcaacactcttttcggatctttggaagaaaaggtgtatgtcccgtttcgcttcgttttaattgcataacgcgggatccattttcccttgaacatgacggaagcgatcacgtaatcgacttcttcccaaggaatttgaatgaatttgcgcacatcgcgctcattgaaaaattcaaatcctttatcgccgatcatgatcttgccgtaatctgtcaatcccatatgcgaggctgcctttgtcaccaaatccacttttgtattgattgattggaccatttgatccaccccgttcttttctttttgtgttccaaaaattgatatctatacagctgatcttgatttccggatcttcgcttccaaaaaggggcctggttggccggtgaaacggctgtacgtcccgtctaaaccggggccggctcccaaggcaaaatgccgaaagcggcttttataatagggaaggcctctcccttattatacgaagttttaccgcctgaagcaaaacatacccagaacccgtatacaacccgggggctttcggtttctttgaaaaaagcccaggccagaaagcccgggcatgtgccttttctcttacattaagtgaattaaatggaatacgataccaacaacaaacaatccaagaatcataacgatcggagacactttctttttcaagagccacatgcagaacagcgtcaacagcaatgcggcaaggcccggaattaagctgtccaggttgttttgcaatgtcgtgactttgaccggttccagtgagaggccggcagcttgctgttcgagcgcctttttaatcccttgcgctccggcaggcaaatgattccagtcaatataagcgcctttagaaagttttacttgtgatacaaccggtgtaaatttaatcgatacccaccggttaaccagtgcgccaaggataaacatcccaaggatcgatgcgccttttgtaatatcctgaagaatgccgcccgataagtcctccgtaattcttgaaccggctctgtagccgaattcttgcgtataccacaggaatcccatccggatgaggttccatgcaacgaagaaaataattggcccgagaatgttgccgtccattgcaagagaagcacctaacgcaccaaggattggcctgaccgtgaaccagaataccggatccccgatccctgccagaggccccatcatcccgactttcacaccttgaatggctgtgtcgtcaacgggggcgccgtttgcacgttcttcttcaagcgctaaagttacaccaacaatcggtgcagcgacataagggtgagtgttaaaaaattccaagtggcgctgcagggcagcagaacggtcttctttcgttttatataattttttgatggccggaatcatggtatatgcccagccgccgttttgcatccgttcatagttccaggaaccttgaaggaaagttgaacgccaccatacagaaatacgatcttttctagataattttagttcttgtgccatttttctgtccgcctccttcttagtaattgtcaataatatcgcctaacggatcgccggtgtttgcatttccgccgcctttaccggagccgccttgtttggagagcgccaaataaatcagtgcaagtgacacaccgataccgccaaggccgataagggtaatttgcgaaacagttgccaaaacgaacccaatggcgaagaacggccaaacttctcttgtcgccatcatgttaatgaccattgcataaccaacagcaacgaccattcccccgccgattgcaaggccatctgtcaaccaagctggcatggcggataacaagtcacgcactggccctgcgccaatggctaaaaccaggacagccggaatcgcaatacgcagcccttgcaagcaaatcgcaacaatatgccaaaattcaacttttctaatgtttccttcccgtgctgcggcatccattaagtggacaatccctgttgcaattgtacgaacgatgatcgtcaataagaggccggcaaccgcaagcggaacggcaatcgcgattgcagaagttacaccggctttgcctgcgccgcttaaaactaagataatggcagatgcaacggatgcaagcgcagcatccggtgctacagcagccccgatgtttgcccagcccaaagcgatcatttgcagggtaccgcctaagataatacatggcaccaagttacctgtaacgaggccaattaatgtacaagcaacgagtggctgatggaactggaattggtccaaaatcccttccataccagctaaaaatgctacgataaagactagtatcatttggacaatatttaaatccataacgagtcgtcctcccttttctcctgatgggcaggattatttgtgtttgttcagctcttcctgagcccttttgagaatttcatccatgtcgccttttgcatcgcccggaactttgcgcacatcaaatttcaaaccaagttgtttcagcttcctgaaagtatcgacatcgtcctggctgaaggccagtaccttgtttggctggactttgcccggcgagtgtgccatggaaccaacgttgattgttttcaatggaacgccgccttcaaccgcccggagcacgtcctgcgggttttcaaaaagaagcagggcgcgctggccgccgaaatgctggtcatcctttgcaagttcaatcattttacggatcggaacaacgtgtgcttttacacccggaggcgcagcctgttgaatcagtttctttcgaaggtcgtccttcgctaccgcatccgatacaacgataatgcgcgtaggccgtgtcgcttttgtccaagcagttgcgacttgcccgtgaagcaggcgggagtcgatccgtgccagcacgtattcaaatttgccaggagcccccaccgttaacggtttcccggcagccttggaaggtgcggccggctgtaatgcttcaggccttactttcacgccttctttcgctgcgcctaaaatatgcgcggcaatgtcatgggctttgttcatcgtggcgcgcgctgcaaatgcttcaatgagcattggcaagttcatgcctgagacgatggcccacttgtctttgtgttcttcaaacaagctgttggcctggttgaaaggtgttccgccccaaagatcgactaagaaaaggacttcatcctggttgtcgaaagaggcgactgcttctttcatttttgcctttacattatcagggccttcgctcggcatcaatgtaacagcttttacattttcctgctttccgaagatcatctctccggattgcaagacaccattggcgaaatcgccgtgactggcaatgataattcctaccatcttcttacctccctattcgtattgttacagtatcaatcttataaataagttctaaagaacctgtaaccaaaattcatggatgaagcagtttctcctttttgatcagctgcatcaaatcgattttccggtcggcaggcacttggcggatttccaattcgatgccgagtgcagccagcttcgcaaaggcctggacatcatcctcattgactgaaataaaattggtgatcatcttcttgccttccgtaaaacgcatgccgccgatattgatcgatttcaaaccaacccctacccggacaacctccagtacatcctgcggcgaaacaaacagcagcatcgctttcatttcgtcaaacagccggttttggtaaatttcaagcagtttttgcttcgtgatgacatgtgatttgatgctcggtggtgtcgcttgcctcaacaaaagctttcgaagctcgtcattggcggcttcatcattgaccactaaaatccggtcaatcccaactgccctcgaccaaactgtggcaacctggccatgaatcaaacgatcatcaatgcgtgcaagccgtatatccaatgccatccgaccacctcctgctaatcaatcgtaaaaaacttgcctttccgccttttataatgcaagatgtgtgccaacttttgagtatcaaaaaacagcccttgttaaataagcgttttcagtatcccttttatgcttatgatacacaaaccgtttatttaatacacattgaaaaagggttttattttccatttcactactgtattaaaaagttctgcaatatccgtatcattttgatacttttggccagcatgtgcattctgtatctgtgatatccctccgtctttttccccagcataaaaaaagcctgcaaatagcgaaactgcgatttgcaggtgagaattactgcacggctgcagtttgctcggcggataaatggtcgatcatatctgcaatataatagagttcatcatccgacagcctcaatttcagctggtcttcaaaaatttgcgccgcctttttatatttttcgattttagcagctttttccggcgtgatgtcgtttttgtaaatgaggccggactgggtgaccattctttcgagcgcgcaaccgatatgaatattcatattgatttttgaagcgttgttaaacggcctttccgctattttttcaagggaagtgacaaacgccgtaatcgctgcgatcactttctttgggtttaaaaaggttaaaaattcattcaggctttcttccgtcatttcccgcaccattgccggagaccttggcggttgttccagcagctggtggttttgaatgagatgggtgacctgcatttccccgtcacccataaacaaagcttcaagcggaacaaacggggcctggactttcggatcggcaatcccgacagcgagcaaaatgtcatatttctgcatcagcgtttctttcttttcttctacttcgttgatcggcagcgggataacggcaatattgtttttgccgatgtttttgagcagtcttgtaatcagctgctttaatttttccgccgtcccttcccctgttgaacagacggaaagaatggcctgcggtttgacaggcttccctgtttcccgcggtttgctttccatctggtaagatccgtagccgcggaattcctttaacgactcataaatatcgtcgaggtccatctccataatcgtcgctttgcggatcgcttcaatgacgagcgccgttgtcaccatatcgatggtccgcgttttgatgcccgtttcctgtgtaataatatcgccgaacccggtcagcgagcccatatcgacaagcagcaggacaccttttcccatatcaatttcttttacccgcctcttcatttcctccaaaacatatttcgggtccatatcgagcggcatatcgatgcagtccacattcgattcgcccaggaggcttttcacaacacttaccatgctgcttgccgtgctgaacccgtgtgcggcaacaaggatcgccacctgctcggccttttgttcgtctaggagggatgtgagtagaatcgttaaatacatggcttcttttaccggcacatgcacgcggtatttttccccgatcattttgcagatgtcaagtgacagctgatactcctgcggccggtcattgatgacattttcgatattcgtataattggctacctgctggttttttacccgcttcaggaaggaagtcaaatgcaggctgaatgccagcaaaaaacgttcatttactttgcacttcagccgcttttccacgatatcctgcacttcttcgctgaaattaaggatatcttcactgacaatttttaagattttctcacggttcagcgcatagcttgaaaacttattgtaaaacttgtttaaatggatatcgatatccagcttcagaaaccggttaatgtcttcatccgacacgtcctgttccatcataaaactgactttgtcctcgatgatgttgtacaggttaaaatccggttcgtatgggtcttcttcaaagagcgccttgttttccccttccggataaaccgtcaaatatgaatcaattaaatcagaaagctcctggatttcctggcgttttctactaaaatagaagaaaccgtttttcagttcggaaggcagatctttaaagtggatggtgatgacatcatcgcgcaggcagtgcagaaaaccgttggcgcagacaagctgtatgttggatttcaactgcccgacgttgccgtatgacgtattgccaattaatgccttcatcgattccgcatcaattttaatcggtttttggacgcggtttgcttcaatggcaagcagaaatttcaaaatctcaatcttgtcaattgccggtcgttcttcaaaagacggaatccggatcagaatcggaatacggcggacaaacgttttcagcaaagaagattccgggtcttccgttgtcgccccgacgatcaggacattggcgttgcgattccgttcggtttccccgagctttgcatacgtccccgtatccataaagtaaaagagcatttcctggccttcaggcgggagccggtggatttcatcgagaaacagcatgccgccgtccgctttggaaacaaggccgtctttttcgctgtccgcgcccgtaaaggcgcctttgatatgcccgaaaatgtgggaaatgagcagctgcgggttatttgcatagtccgcgcagttaaagacaataaactgggcgtcttcgtccataaacggtgctgccagtttagcataattgaacatcaaattggcaaacagcgttttcccgacaccggtctggccgacaatgagcgtatgaaggccatgcgggggatagaggacggccgcctttgcctgttcgacctgcactttcaggcttgttttcgaaccgatcaggtcatcaaagggattcgtttcccaagcggtatcatgattcgcagacgggccgttgcccggatccggggattgcccgcccgtcacttcaagtatattttcatattcatattgatcttccggcaatttcgttcccagaaggtcttccatgatttgtttgaccaagtaatgaaccgggcggccttttattttgataatccgtttctgccgcagcagcttgttcagctcggcactgacattgtttcttaaaatgccaaggtcttttgcgatatccgaagccgtaaatccttctatacggatccattcatcaagcgttttgccttgcgactgttcaacaagatacgcgtaaatgcggtcaatgcgtttcaaattgccaccccatttctaagtataaactgtatcttaatagtatcacgaatgtatcatacataatagcaggaatatttgcgaacatgtgtcaagtttttgccggaagggggcttatttttaatacacttcaggctccgcggtgcttccgggaaaacagggcaggaaaaaacagcgccgcatatgggcgctgttcatccaacaatttccggccgtttcaagccgtttccatccttctgctttccgcaacatccggccggttaatttttttgttccggaaccggtccatgcatgtatttccggcggaatccaggcggttcatttatgatcttatattattgagggcttgctaaatcagcactcggaccccattttcagcactttagccatgcgttcagcaagccccgtttaccccttaagtcttgtacctgccccgtcccacccgccttgcgaaaagcttacactttcccgcctgttttctgcccgagttgcatccattcaaactggcggagtttcagctcgaacaatttcagcggatcctgatacacttccggattttctttcatattctccagcatctcttttgtttcggcaatggccgcctctgtttccgcaatggtttcgcggagaactgtttccggatttttaaagaacaggcggacatcgcgctcaagcccttgttcaaacagctcgaattgcagcatcactttattcgtgacaaggtttgcaatttccgtataatcttcgctttcgataaattttttatagcggttatacagcatcgttttgttttgcgaaagcacgccaaacaatttgcccgcgctctttaacaggacctgctgcggcgtatggcgcaacaatatattgaccggttcaaaaggaattccgtttgccatccggtccgcatcacgccgccagtcctccataattttaaaatcacaggcaagcacaagaatctcttccccgtacaacttattaaacccttccgccatttcatcaagataatcctggctttgctgcaattccccttctgacgcttctatccactccgccaccagttcctcgtatttcggggaaatggtcgtctgcaaaaagtgccggatccgtttgttcatttcttcattcaattcaagatgaattttccggaaatcactgtccggcttaataaaatcggcgcttttccgtaaaatttccggaatccggttttgcagttcatcgcggattttctgggtcatactgtggtaggacgagcggaccagttcggtttgttcatggatgacatcctgaagctggtttgccgccccgtttaattttgcgtacagatcttcatgccggttgattgactctgccagatgctgttcattttgcagcctttgtttcagcaaatcggcaatcgattcccggatgcagtgcgaaagtttgtcaatccggctttcttccaggttttccggcttgaaattttgccggaaaaagcgggcaagatccagccctgcttcccgggatgcataattggacgtataagggtgcaagtttgcctgcggaaaaattgtttttaccttttgtactgtttcttccactaaatctgccgcttcctgcttgctgtatatcatatccattttggacagcaagaagtgaatcgcaagcccgggcacttgttccttcattttcaacagcatatccgcttctttgtctgtaaggggatcatttgcatttaaaacgaataaaacgccgtcaacaaaacgcaaatactcgtatgcttttccccgccccggcccgttcagcccgggtgtatcgatgaaaataagcgcattttcttccaggaaccggctcgggccccgccattcaagcatgtccccgggctccggcgccgcattgtcctcttccgttacaggcgaaatgcctttgtccgagatcacagaaagtgcatgttcatcatcatggcgcaccgccatcacaaactgtgtcggccgttcgggcagcgggtcggccaacaccgactggataaaggccgtcttgccgctgccgttcatgccggcaacgagaatatgctggacatcaaagtcaatcagctccctcgccatccatttcaaacgggtgctgacagatagcccgttcctttttgcccattgcataatggaatcaaagagccggagcgcatattcaagctggtccaatgtttgctccgcatgatgcaaaatcgtttccgcatcggcaatttgctgcggcccgatgctgcccggaaaaagatcgccccatgcgagaaccgcagtggatgcttgaagggcgtgcgcctggtccgtgatccgcagccagttcgttaaaatgcccggcatcaccggtgccagttgttttaacagatagttaccgctgattaaagaaagataggtttccccgtaaatggcagacagctcgtgccacgtttcaagcgaatggagttcaagtccggcaaaaaggccgttaaattcgcggagccagccaagatacacgtcctccgtttcgtaagaccgccaaaacgcaaccgccagttgttcaaactgaatttgatccaccttgtataaaacggacagcgccgtccggaaataatccggcgcaatcgttttggtatgcccattttcaatatacgactttaaattttgaaaccagaacagcgattcagtacggatggcttcattgacagccagttcaaccgcattcatccagtcttcgtttttttcaaagtaggcacgggcgattttcgtcacattcggatagtccgggttcatggcgaccgcttgtttgatcgtctggacagcctgttcatgcttttgctcctctatataaagcgagataagctgaagcgcaatctccgtctttaataccatggagtctgtctggaccgacttgtaaatttcttcggccatgctggtgaggccgagttcaaaataagcatcccccatgtttttttgcgcccacggttcaaagtcgttatgtatgctttcccatttaaaaacggccgcttcgtaatctttataatgaaaataaatttccccttgtgcaaagcggatataggaaagatcggcattttcaagggcgttttctttttcgaacgcttccccgagcacttcaagcggatggcgctcttccccttctttgataaacgtttcataataagatttttggacaaactggtcttccggcttcatgattttcctcctcacacggccttttatatctctatcatatggcatccgggatgcagcgatgtgtagaattttgtcgattactttattttatcaaaacatctccggcaaaaagtttcagttcgctttcaattttgatacaaaaatgaaacatttgccatattttcgtttgcatgccggcaattttgaacatgcttaccatttatcacgccgtttccgctcatggcatcatacccggaaaagcgccggaatgaacgggaaacgttttctatgttataatattcacattacagattggaaggagcatcagcgatgggaaagacaaaatggacagggtatgccggcacctatacaaaaggcgccagcgaagggatttacacctttacccttgatacagaaaaaaagcaaattgaagatgtgaaggttgccgccagactgggcaatccgacttatcttaatatcacggcagacaaccgcaatctgtatgccgttgtcaaagaaggcagccagggcggggttgcggctttttcaattgatgcggaaaccggtgctctaacagagttgaaccgccagttatccgacggcgcctccccgtgccatgtcagcgtggattcagccaagaaaacggtcgtctccgccaactaccataacgggacggtcagcgcctatctgacaaacaaagacggcagcctgcagccggcagtaagtgttatcgaacataccggatccggcccgaaccctgaacgccaggaaaaaccgcacgtccatttcgcaggctttaccccggataaaaaatatgtcgtcgcggtggacctcggcaatgatacgattacaacatacgcgcatgatggcggcaaattaacggaaaaagccgtcctttccgtccgcccgggaagcggcccgcgccatcttgcctttcatccgggccggaaattggcctactgcatgacagaattgagcaatgaagtgattgtgctcgaatttgacgaagcttccggcacgtttaaagatgtccagtatatcaaaacgattccggaagattttacggaaaacagccagggaagcgcaatccatctctcttccgacggccgttttgtttatgccggaaaccgcggccatgacagcattgccgtgtttgcagccggcccggacggcaaactgtcccttgttgaatacacttcaaccgaaggaagctggccgcgcgactttgtgcttgacccgaccgaaaaatttgtcgttgccgcaaaccaagaatcgggcacgctcgttttatacgcccgcgatccggaaaccgggatcctcactttgctgcaaaaagacgtcccggttccggaagcggtttgtgtaaaatttttgcacgggtaaaattttagcgattcaaaaggcgggtcccggtccgctttttgctttttccggggaaattctcatcattttatcattttcatttcacaagtttttctttttcatgttttacatttaggacagcggcaaggaattgcagcaaaccatatttggccgggcttcccccagagcctggccaaacctccttttatcataccggccttgtgccggttttttattggccgagtttttcggcgacggaggccagttttccttccatcgtgagctgtttgtccctgcggtcgtcgatgcggatattcgtttcaacacgctttacgccatttgaaaaagggatttcatgcagtttttcaatgatttcaaacaggtcatggatgtccccttctattaaagtgctcatcggggtcagcttgattttcacccttccctgttcttttcccagcgccttctcaatctccgccacatatttgctgatgcttgttgaatccgttccgaccggaaatatggtaatatcggcaatcgccaatgcaatcccctcctaatattcttctttcttattataatccaactttatttttcatgtcttccttctcatttttctgtatgtgtcaagtttttctcgacaaggtttaaatatcgggtattccaagacactctttttgtacactttcggctaccgtgcttcacttgctcggtgtaattttcggaaaagatgtgatatttccgtataaagatggacaacggggatgttgaggcgcgcgaaattcactcgctttccgcgggcggccggcgagcctcctcgctcgtacctcgctgcggggtctctcctggctcgcttttcccgcaggagtctcgtaaatttcgcgcgcctcaacgatcagtcccgactgagccaggcttaaaatgaaagctctaatattttgcttaaatgtcccattgccgatgaactgcttgaatgcagggcaactgatccgtgctttacgcccactgacgggcgtacaggctgcttgagtagttgagacatcctgatggattgtttcaagttccgttgctttctctcgcttcttgaacggtgtttcagataggcttctctcaatgtcccattggtaaaattttacacatacatttttcttgtctattccgcttttttcattcgaatagcccgctttctttcccttttcttgtaaaacgttcggtcatacggctgaacagttttttggctgcggtcccgaaaataagcgcaattgccagaaatcctgccagataaatgatatctgtgatcacagcctccatcagcatcccgccaacagcttcacgcattaagccaattccgtaagtaaatggcaggagcggatgaatatgttgaaagaaagacggttccatctggattggaaaagtgccgcccgaaccggaaatttgcaggacaagcaggacaatcccaagtgcttttcccacattgccaaaaacagaaacgagtgtatagaccatcacggtaaaaacagcaccaatcccgataccgaataaaataaaccaggctttttcctgcacatccacatgtaaaataaaaaggtcacccgccgccgttatcgccgactggaaaaacgcaatcgttaaaaacaggagcagcttgccgaaatagacttgccagctggcatatgcgccgccatggtggtgttcaaccgacagcagggataccaatagcattgcccccacccaaaaagacaggactgtataaaacggagccatgcccgcaccgtaatttttgattggatatagaacttcttccttcagcgataccggctgttttaaaaactcgctttcttcttgtgcatcgttcttcagcagttgaatccaccggtctatatttccctgtttttcaaacgcccggattttaccagccagttccctgatttttctctcagcagctggcagttccgtttcagccgttttcaattttgctttcccgattgcaagcccggttttcgtatcgtggagaatcgcctggatatccggcagactgccttccaatttttgaaacagcttgtttgcttttgcactgtcctgcccggcttgtgccacaaatgtttttaaatccgcggcgatggctgcaccatcgttttcaagcaggctgccggcgatggccccggcacggccggcttcctgctttagatctgcctgcaatgtttccggcagcaacccgttattgacctgttggagaattttcccgtttaggtcctgctgtttttgaaaggattggctgagtgcaataaaccgggctgccatacgcttaagatgttccgaaccggtttcttcagcaacggttcggagcaaatcactgaacgcgtcagagatttgcttgctattttgcaaaattatcgtattttttggcgctgtttctgcaattttcgttttgtctgccagcatactcacctggttcgagactgcaggggcggcattcagtgcttccagtccggttttgatcacggtatccgtctgctcaagcaaacttccagtgtttccaaaaaagcgggacatgtcccctgagacggttttgccgtgttttgcaagcagcaggacatcgggcatcgcgctttctgcctgttttcttactgcgtctgctttcgtaatatcccgatctgccgtcctgatgatccggttaagctccggaatgtctccctccaatctaaaaacccatgctttaaagttttcgatatccggcaaatccctttcaagttcaatgccgatttgattaaatattgtaaagatcgttttactgacagtttttacaaatgcggcactgatttgctgtgtaatggcagacgcacccgaccctgttattttaggcgcaatcgcattgattttttcatttacggtataagtaataaccggtttctccggcttatcacccaggatggaagccagtttttccgaaaaattttccgggatggtcaggcttgcatagtactctccggtctttacgccgcgtgcggcttccttttcctgcacaaacctccagccgagcgttttattttgtttcaactttttcacgacatcattaccggcatgtactttttttccgttgatcgctgtcccccggtccaaattcacaacggctaccgcaattccttttgtgtggccgtatgggtcccaggatgccttgatgttaaaccaggcatacaatgacggaagaatgatcaaggcggcaatgatcaggcttgctgcccagtttgttgtaatttttttcaaatcggttgtataaatcttccatactttttccattggcagcctccaaatgttgttgtacctatatgttttccaaccgtttgaactgtcatgtacacgcaaaaaagcctgtgcgtctccggtcccgcacaggttagcgtcaaacaagccattttccttatataattgatttgcggcccgcacaagcaagcgtctgcagtaacgtaaatattacgaatgaaagcaggtgccctcattttgcggttttacaagcagcaagtccgttatttcaccggcaatgtccgttcccctgcaccttatttatgtccaaaaacctgctttatttccgactgcagctgctccagtaaaggaaaagaatggttcagcgcaatactttctgcaatacttcgatagtaccattcctgcttttcttttccacggctgaacgcgttccacacgctttccccattttttcgcaatccttcgtgtatcgttttcaaattgtggagtttatctgcacatatgagcatacaaatttcctcttctgccgtttttaatcgctcgatggtatgctgtttccgttcctcccagcgcacatttttaggcggttcggtgcaggctgcaacaatgcgggcaacatcgcttccaaactcgtcttttatctcctcgtttgtcaccgcagtatcttcaaccgtatcatgaagaagcgctgctgtgaccacttctttgcggcagccttctgttaaaagcatcatggcaaccgcatacggatgcgcaatatacggaaggtcggacgctttccggtattggccttcatgtgcttttgccgcaaattcaattgctttttccaccatttccattagaaattcctctcttcatacaaagctgctttcatcatcataccaaaacggcgcggctatacatgaatgaaaatcgaaaagttcagcactacttttggacttcttaaacatcaaaagaatccttgaccggcacaaaggcacagaatattccttcccatcctgtctgaattgaaaaagaagctgatccttgcttctttttatctattttcttcgcctttacccccgcgaattcttttatgttatcactttttcccacttctcgatatgctttatccgaccattgcttgagcacagtgatttgccgctgtacccgctttatttctttttgctgcttttcatacgcctggaggcagaagtcttataactgcccatcatcatgcgaaaaagcacccaaatctatcttttccctttttcgcatgatttgagtccgttttcattctcgtaatatgaatttaatcgtattgtaatcttcctttctgcctatttgtgttataacaagagtacggagaagggagttgtcttatgcacttaaaaaggcgaattgcagttatggcgtttgccatattcgttggcacggcacaactaaatgcctatgcagaaacagatcaaggttccttacagaaaaaattggatgaaaatacgcaaaccattcaaaagaaagaatcggagaaaaaagccgtcgaaagcaaaatggaaaatttgcaaaaagactggaacgcattgcaatcatccattcagaaaaataaagaaaatatcgcagcaactgaagcgaaaatccagtcagcaaaagatttgattgaaaagaaaaaagaggaaatcgtaaagctggaggaccaagtttctgcacgggaaggcgtgattaaaaaacgcctcgttgccatgcaaaaaaacgaccaatacgactatgtgattgaaacgattttaaacgcggaaagcattggcgacctgatcaaccgggtcagtgcagtcgcgacactgctgaacgctgatacaagccttttggatcagcaaaaagcggaccttgcgaaaattgaagccgataaaaaagccattgcagaccaggaaaaagtgctcgaacaggagcaggcaaacttgaaaagcagccaggcaaaactgcaaacaaatttaaaagaaaaggaaaaagcattgtcgggattaaaatcgaagtatgacagcattcaaaatgagctgtcaaaagcggaacaaaaacaaaccgacttgaatacgaaaatcagcaacctgcaaaaagaaataaaggcacagcaggcggccgcaaaagccagggaagaagccctcgcaaaacaagcgagcgaagctgaagccgaaaaggcagcggaagcgcaagctgaaaaaacagcagaaacacaagcgaaaaaaccagcggaagccggtgccgggaaaacggccggaaccaaatccaccgcatcttccggccacagcacgccacaaggcaaatccttttatgtgacggcgacatcttataaccatgaagatacgaagctggatattaccgctttgggatataacattaagaaaaacccgaacatgaaattgatcgctgtcgatccgtcggtcattccgctcggcagcaaagtctgggttgaaggatacggggttgccatcgcagccgataccggcggtgccattaagggccatatcatcgatgtcctgatgccgaacaaaaaagcttccatcgcatgggggcgccgtacggtcaaagtgatcatattgaattaagaaaaagcagccttgaatcgattcaaggctgcttttttatatccgcctatggcaggcccgctcctaaccccggcaaaaaacaggcccatgcttttcccggaaagcggggcaagcatgggcacttttttcggcagtccgccttaagcaggcgccgggatttttttcaaagaaaaagccgggcctcccatgaagcccggccggcacaaatgcttacaatatcggtgccattgtttcttttagcacttttacagaatgattgaactgttcctgttctttttcgttcagtttgatttcaaccacttcacggatgccctggcgattgatgatggccggaacgccaacgtacacatcgctgtttccgtattggccttcaagaaatgcagagaccgtcaatacgctgttttcattgttcaggattgcccttgtaatccgggtcagggacatcccgatgccgtaaaatgtggccccttttcgttcaataatatgataagccgcatctctcgtattgacaaaaatgtcatctaacgtcttttcgtcaataattcctttttgtagatagctttcaatcgtatcgtaaccgatatttgtatggctccataccggaagttccgtatcgccgtgttcgccgataatcgcagcatgcacattgcgcgggtcaattccaaattgggcgctcaaagagttgcggagacgcgcggagtcaagcactgtgcccgaaccgataacatgttctttcggcaggccggactctttccaagttacatatgtcaaaatgtcaaccgggttgctggcaacaagaaaaatcccgttaaagccgctgtccatgatgctcttaatcatgcctttaaaaatttttgcgtttttggaaacaagatcaagccttgtttcgcccggtttttgcggggaacctgctgtaatgacaacaagatcggcagtgccgcaatcggaataatcgcctttccaaacgcgggtcggcgtaggcgcaaatggcaggccgtggttcaggtccatggcttccccttctgcttttgcttcgttaatatcgattaaaacaagctcttctgcaacaccctgattaatcatggcgtagcagtaacttgtaccaactgcacccgttccaaccactgcaatacgattgacttttttcatatataatcttcctccccatcaaaagtaaaaaatatttccactgtatgaaagcagttttgcaagcccggcatggcgggcccctatccagtctatggatattgtgccaactcctaatggattccatactgcttttcctttaaagcaggacgattaaacttttgcagcaaatgctgccgtgcggtttgtgaaatagatggacggcatgcccttttatggctgaaatggatcgttccgttcattttccttcattccacatgggtaagtataccactatttttgtgattagattcacatattttatggcgaaaatttgaaaatttatctgcccaaatgcccggttttaaaggaaaatgacggtttttcaaaatcatccgtttacatttttcacaaatggttttatttgaaaaagccagatatgtaagcgttattcattcttgtgctgattttcacaaagtgccccggatggaggaataaatggctgatcccgcccaactgatctctgccatttttgctcctgaatgcctgccctccaaaaaagcgggtgctgcccgcttaaaagaatctgcttcacatgcatggaggcgtgcccgccagacatcgacaaaaacgcaactgtacagccattcaattgtgcatcaaaaatgaacatcgtgtggacagccagtacgacgggcaaaataaagccgaccataaaatcaacttcatataagtgcacttttttctctccataccggctgctttcatttattatcaaagaagaagagaacggtttcaatgtcaattcttttctttccattcccggtacttgccatgtaaaaacacgaatgatattcacagttgactttcaattgttcgtgttttatccttaatttatctctttatgcgaggaatgttcctatgctggtttttaattttataaagtattagacttttttcattttacaagtataataataagtatcattttctttgtgcatttttctgaccaaatgaaaggagcgattatccttgcatcaaattgatgaaaagaaagccccccagatggccctgcaggcagacatggattttctcgccgggctgctggataaagtgatcctatttgaaggcggcgaagcattgcttaaaacaatccaaaatattcgctccctggcacaaaaagcgagggaaaccggcgatgaggctttctaccttcaattaaaaaaagaaattacagacctgaatccgcctgaacggcaagaagtcatccgcgctttctctacctatctgcaattatttaatattaccgagcaaaattttagaattaagcgccggcgggagtaccagtcggaagatacagaccaggtccaaccgcgttcacttgaagatggcatcgaaacgctgcggaaagaaaaagtgccggctgaagtggttgcagaactgctgaacagtttatcgcttgagctgattataacggcacacccgacagaagcaacgaggcggaccattctgcaaatccataaacgtattgcagatcttttaaaagcgctcgaatatgccaacacccgttatgagaaaaaagtcattgaagaaacgattttgaatgagattaccattttatggcaaagttccgaaatccgcgagaagaaaccgtccgttctagacgaggtgaaaaacgggctttattatttcgacaatgtcctgttcgacgtgctgccgcgcatacacgaagacctagaagactatctgtacgaatcgtacggacagcgttttaaagtcccttcttatcttcatttcggatcgtggatcggcggcgaccgggacgggaacccgaacgtgaccgcggacatcacctggaaaacgctcgagatgcagcgtgaactcgtattggaaaaatataaaaagtcgcttaccacactccgggagctgctcagccattctgccaaaaaaataagcgccagccatgccctgcttgcgtctgtggaaagcgaagaaaatacaatcccggctgcaaaattatggccgacaaaagatgaaatttaccgcagaaagctggcgattatgatccataaactggaatgtgtgggaaaaagcaatggcggctaccaatccgcagaggagctccttgccgatctgtatatgatccgggacagcgtgaaccagcaccatccggccgggcatccgattaaattgctccgcaaagttatccgccaggtcgaattgttcgggttccacctagcatcactcgatatccgcaaccatagcggcgaacatgaatcagcacttgccgaggtgctttataacgtcaatatcgcgaaagactataaaaatctgcccgaaaatgaaaaagtcgcggtgctcctgaaggctttaaacgacccgcggccgatgatttcaatctatgatacgtttacgccggaaacgcaggaagtcatcaacacattccggatgatcaaacgcgcccaccaaacattcggcgaacggtccatccaggtgtatttgatcagcatggcacattcggtcagcgacgtgctggaagtgctcgtgctcgcgaaagaagccggcctgtaccgcgtctacccgaacggcgaaattttaagtgagatccatatcgccccgcttcttgaaacgatcgaagacttgcggaacggcgcgaaaatgctcgaaacccttttccaaatgcccatttaccgcaaccatttaaaggtgcgcggcaatctgcaggaagtcatgctcggctattccgacggcagcaaagacggcggcacgatgacggcgaactggcagctgtacaaagcacagaaagagatccacgaaatgggtgccaaatacggcattaagctgaagtttttccacgggcgcggcggttcactcggacgcggcggcggcccgctttattcaagccttttgtcccagccgccagttacacttggcgacggcgtgaaaatcaccgagcagggcgaagtgctgtcatcgcgctatttgctgcgcgacattgcctaccggagccttgagcaggcgacatccacgatgatgtgtgccatcacagaacagaaacagaacgagaaaaatggcaaaacgccaaacgaagaagctgtcagggcaatggataaaatttccgaatatgcgcttgaaaaatatcaggaactcgtcttccgcgaccctgacttcctgtcttatttcaaacaggcaacgcctttaaatgagatcggtgaactcaacatcggctcccgcccgatgagccggaaagggagcgcccgtttcgaagacttgcgcgccattccgtgggtattttcctggacgcaaagccgccagctccttcccgcctggtacgcagccgggacaggcctgagcaaatatgtggaagaaaccggcaatttcaagttgcttcgggaaatgtatgcatcatggccgttcttccatgcaacgatcaataacctgcaaatggcattgatcaaggcggagctttctacggctgaagaatatacaaggctggtgaaagatcctgaagttgccggccggattttcggcctgatcaaagcggaatacgaactaacgaaggaaatggttttaaagattgcggaccaaaaagaattgttggattacacgccaaacataaaagaatcggtgcgtctccgcaacccgtacgtcgacccgctgaacctgttccaagtctaccttatttcgcaactgcgtgaacgcgaaaacaaagatgaaaaagcccggcacctgctgatggaggtcctgcttacgatcaacggcatcgccgcagggctccggaatacaggctgatagcaaaaaaacctgtcttgaatcaaggcaggtttttttgtccgcttcatggattccaaaagggatacgttgtcttccacaatcaacagcttcatcagtcaaacctccatttttccattatattaaaaattaatttaaaaatcatatattcagtctatgatttctatgaataattgcttaaaataaatctatataagagctctgcatcgatccgattattcagttatttttcctgaagaaaggtgatttagatgacaaccattcgggatattgcgaaaaaagcaaatgtctccgtttcgactgcttcacgggctttgaataataatccgcgcatcagcgtaaagacaagacagcgcatccaagccatcgcagccgcggaaggttatatgccgaactataatgccaggaatttaacgcttggtgaggcaaacgtcgtagggattgtatttccggcagctgaaaacaatgtacaggggaatcctttctatattgatattttacggggcatcaacaaacagctggcccctcgccactacgttctgtcagttgcgattggtgatcacacagaacaagtttttgagaacgtgaaatctatggttgaacaggcgaaagtaaagcgatttatcttactgtattcctatgcaggcgatccggtaacagaatacttgcgaaaaaaggcattgcgctttgtcattatcggcgagccggttgaagataaaaatgatttttatgtagacaataataattatcaagctggtattgctggaacagaatacttgctcgggcatttaggggcgaaacacccggtttttgtcgaatcttcccatgaatggccttatgagcgcagcaggcgggaaggcttccaggcagccattttaagacgtggcgtttccccactgatttaccgccttcaaaaggaaaacaatgacggcataacggtggagtttatccggcagcatccggaaattgatagtatcatggcgactgatgacataatcggttttgaattttaccatcattggcagtgcgcccatcctggcaaaagcataccggctgtaagctttaatcattcttttattttacaattggcaaatcatcagtttcattcgatcaatttatttccggaaaatctcggttctgcagctgtcgatctgctttttacagataaggaaaataaagggggcgaagagccaccgcgtaaaatcattctgccatttgaaatcagttaacggcagtgttttacatgcagtagattccaatcttgcaaccggtttatggatattttgtggtatgtgtaaaattttacaacttgacacatactattttgtgaaaccggttgcgctgatccggtaaaatcatatataataaagatgttcgatgcagaagacccaaaatgatgaacatgttcattttttattgcctgtaatgcaaccgattgcgcaatcccctgccatgaggttttaataagattaaatctataactactagctggaactaagaaatctggaagaaaattggttggggcttccaataaatatggaaagcgatagtacattggcggcaaaaatgcaaccggttgcgccttgaaaagggggaattacgatgaggattacccaaaaataagggaataaaacttctgctggaacgaaccaatatggatcttcaaagtctgtaataaatatggaaggtgtctctgcgtttacgggggaatgcaaccggttgtgaacgcaaccagaaatatctggcctgagcgcaggcttttaaatagaatggaggattgatcatgcgagcaacggtgaataccgacaaaaaaagtattggacgggtaaaatcatctgcaactgttaaagacggcaagaaaattggcagccaccaattgccggcgctgccaatcagcacgatttggatgattagttttggttttttaggtgtgcaaatggccttttcgctgcaaagttcgaatatggggcgcatctttcaaacgattggcgccgatccgacaaaattaggtttcttcttcatcttgccgccgcttgctggacttgttgtccagccgttggtcggttatttctctgaccggacatggataccgaaactgggccgccggatcccttatttgttggtaggggccgttgtggctgtgatagttatgtgtttgcttccgaatgccggaagttttggctttgggttcggatcaatgacagcattgacatttggagcggtggctatcttgtttatggatttatcttccaatgtagccatgcaaccgtttaagatgatggtcgccgacatggtaaatgaagaacaaaaaggttttgcttatgctgtccaaagttttctctctaacagcggtgcagtactggcctgtatttttccgtttgttttaacggcattgggcgtttcaaacagtgcaccaaaaggcgtggtgccgcaatcggttgtggtctcgttttacagcggagccgttattttaattgtgtgcagcctgcttacggtttttaaagtcaaagaatatcccccggatgagtatgccgtttatcatggcatccaaaatcaagcccaaaaagaaaaaaagggcatgtttcaattgctcctcaatgcgccgaaagagttctggacgattactgtcgtacaatttttctgctggatgggttttcaatatttgtggacgtatggagcgggggcagtggccaaaaacgcttggaatgcagtggatccgtcaagcacggcctatcaggaagcagccaactggttcggcattttatcaggtgtgtattcccttgccgcggtattttggtctcttgtgttaacaaaggtaccgaaaaataaacagaaaccggcttatgcgttcagcctagtgcttggcggggttggtttcggttcagttttctttatccacaacccgggcacattacttgtttcgtttatcctgatcggcattgcatgggctgcgatgatggcattcccgttcacgattctgaccaatgcattatcaggagagaatatgggaacctatctcgggttgtttaacggcagcatctgtttgccacaaattgtggcttcctgcttaagttttgtgatattcccggcgctcgggtcctctatgccggcgatgattttgttgtcaggcgtgctgctggttattggggcggcttctgtttcgctgattaaaaaaacgcaaacaaagtaaatttttatggaaaaggggaatgaatatgaaacgtatttttgaagtacagccatggaatgttgtcagccatgattttaaccgggcagaaaaaaggttgcaggaatccatgaccagtttaggcaacggctatatgggcatgcgcgggtttttcgaggagaactacagcggagatactttgccgggcatttatttaggcggtgtatggtttccggacaggacccgtgtagggtggtggaaaatcggttatcctgaatacttcggcaaggtgattaatgccatcaattttattaaaatcaatattgcgttaaacggagaatttatcgatttggctaaagatgagattaccggattcgaactgaatctcgatatgaaaaacgcacgtcttacccgttcttttactgtggaaaagggtacggcaaaagttgtggttacctttgaacgtttcttgagtgttgcccaaaaagaattgtcattccagcgggttcgcctaaaaaatctcggatcagatgatgtggacgttaagatcatttcagccatcgatgcggacgttaaaaatgaagatgcaaactacggcgaacgcttttgggaagtattgcaaactgatcaaaaagaacaatccggatcactggttgccattacgaaagccaacccgttcggaaccccgcgctttaccgtcggggcggaaatgcaccatcggacagctttgcaagcgaaagtagctgcaccggctcatgataaagaagttgtaaatgaatttagcggtaaattggtagccggttcggaaatcgattttgaaaagcgcgtgatcgtggttacctctcgggattatcatactcaaaataatttggtttctgcgatgaacgcgatcagcgaaaaaactgacaatctatcctatgatgaattattcgatgcccatcgtgcgatttgggcagagcgctgggaaaagtcggacgtcaaaattgaaggcgatgttgcagcacagcaggggatccgttttaacctcttccagatgttttcaacgtattatggtgaagacgcccgccttaacattggtccgaaaggatttacaggtgaaaaatacggcggtgccacgtattgggatactgaagcttttgtcctgccgttttacttgggggtggcagaaccaaaaatttccaaaaatctgttgaagtaccgttaccagcagctcgatggcgcttatcataatgctaaaaagcaaggattaaagggcgctttgttccctatggtcactttcgatggcattgagtgccacaatgaatgggaaattacgtttgaagaaattcaccggaacggggatattgcttttgccatttataactacacccgctataccggagacaagtcctatgttttaaacgaaggcagcaaagtgttgacagaaatctcccggttctgggctgaccgcgtgcatttttccaaacgcaaacaaaaatatatgctgcacggcgtcaccggtccagacgaatatgagaataatgtggataataactggtataccaactacatggcccgatggactttggcatacactttgcaggtcctagaggaagtttcgcaggaacaggcagctgttttaaatgtgacagaggaagaaaaacagttgtggcaggatattgtagaccgcatgtatcttccggaagatgaagaactcggcatttttgtccagcatgacggtttccttgataaagatattaagcctgtgagcgaaattccggctgatgaattgccaatcaatcagcactggtcatgggataaaatactgcgttcggcgtatatcaaacaagcggatgtattgcaaggaatctggaattttattgatgaatttacaccggaacagaaaaaacgcaactttgatttttacgaacctttaaccgtgcatgaatcgagcctgtctgcttctatccatgcgattctggctgccgatctgcacgatgaaaacaaggcggtggaaatgtatgaacggacatcacgtcttgacttggacaactataacaatgataccgaagacgggctgcatatcacttcaatgacggggagctggttggctattgtgcagggatttgccggcatgcgtgtccgggatggcaagctgcactttgccccgttcctgccgaaaaaatgggacaaataccaattccgtctgttgttccgaggccgtctgattgaagtaggtgtggatacaaatggagtgtcacttgaattgctggaaggcgaacccttgacggtcggtttgtatggaaaagacgttgaactggttgcacaatcttcggtttttgtttaaatgattctcctttatgcgaagatatcggaggcatttttccaaaatattttcatcctaaggctcggttaaatgttattgttgatggccgcgggagactcctgcgggataagcgggccaggctggccccctcttgctgaggtatcgggcaagaattggcaaacgggcggatatcgcggccatccacattgtacactaacgtaaaaatagagaaactctgggggattccaaatgagaagttttcatgatattaaaggatttgcttttgaccttgatggtgtattgacggataccgcccgtttccatgcacaggcatggaagaaaacggcagaggaagtcggcacgaaatggacagatgaactggctgcgggtttaaaaggaatcagccggatggattccctggaaatgatcctgaaggccggaaactgtgagcattcttatacacacgaacagaaagcacaattggcagatgaaaaaaatgagtattataaaaagctgatcgatacattaacgccggaggatattttgccgggaatggctgaatttttaatggaggtcaaacataaagggtacaagcttgccgtcgcttcggcttccaagaacgcacccatcattttagagagattgggcatcgctgatatgtttgatgcggttgttgatccggctgctttaaaatccggtaagcctgaccctgaaatttttgtccgcgctgcagagttgatgaatctgcaaccttgtgaagtgatcggcttggaagactctatcgcgggtatcaagtcaattaatggtgcgggggaagtatcggtcgggatcggggacaaagatgaactttatgaagcggctatccactttgcctcaaccgcggaggtcagcctttctgccattcagggtgatccatatttttctagatcaaatttgtaaaatatccattgttcatctaagaaaaagaaatggatattttttcagaaaaggggcagtcccaaagtcctttttaaacaagaaaacccgttgagatattaattttgaactgccccctgtcaagtagacagtggaaataataaaaatgatttaagcggctttagctctatattccatcgggctaaggccgtttaatcgtttttggtatctttcatgattataaaaatggatgtattcatctattgccagagaaagttcctcaaatgtcttatattgatgtaaataatacttctcacatttcagtgttccccaaaaagattccattggcccattatcaataccccgaccaactcgtgacatactttgtgtcatctttactgcgtctatcttacatttaaatcctttggaagtgtactggaacccacgatcactatgaataagtggatgttctccatctcataatactataaatcggatttggcttagtttcgcctcctttcgatctcctctaacttttttaagaataagttctccgcacgtaaccgttcattttctctttctacctttttcatttgaagtttgaatttctcttctggagtcagcttagcttcttctttcttattcccacgtctattccgcaacatcgatggggcaaacttaaatttttcttaatgttttcgttgcaaaatgcgatgattgaaaaacaggccgcaccgtcagcccgatactgacggtatatgaagggaatcgacaaaaaggatattcaagcgtagcgagtcatgttataataaccaattatatgacgaaaaagtgagggccatcgatgaagaaaaaaatcctgatgtcttttttaagcttaattgggatcctggtcatcgcctgtggcggttatgcctactatgtttatcactcggcaaaagctgcggctaataaaatgcatgaatcgttggcaggcacttcaaatgaaagcatctcaagccagagcgggcagccgatttccgttttgctgcttggtgtggatgaacgtgcaaatgacagcggccgttccgatgccatcattgtgatgaccattaatccgaaaaaaggcacgacacagctggtcagcatcccgcgggatacaaggacgctgatcgccggacgcggcacctatgacaaaatcaatgctgcatatgcatatggcggaaccagtatggcactgcagaccgttgaggactttaccggtatccaaatggattattatgtgaaaatcaacatgcaggccctgaaaaaactggtcgatgcggttggcggcattaccgtcaacaacacaattgactggcatgacgaagggtactataaaaaagggtaccattacaaaaaaggggaaattcatctgaacggagcccaggcgctcggctatgtcagaatgcgccatcttgatccggaaggcgattttggccgcaataaacggcagcggaaagtgatcgaggcgctgatccggaaagcaaccagcatttcttctgtggcaaaatacagcagtatccttgatacgcttggcgacaatgtcaaaacaaatatgacgtttaatgacatgcttacgattgagaaaaattaccggaatgccgccaaaaacattacccagtatgaagtaaaaggcaccgatgccaacattgacgggatctattatttggcggtgtcagatgctgaaaaagaaaaagtcacgcaaatgctggaagaaaatctgtctggtgactaaggaatagcggaaacaaacaacccgcttccggcatgcagaagcgggttgttctgtcaacggctttcaataaaccggattacttcttcaagcggcgtttctgccattgacccgaggcggtggtcaatctcgccgaacttgaggtcttttgttacccggttcgggacgactacgcatgccataccggcgcgttttgccgcaagcgacccgtttggcgaatcttcgaagacgaggcattgttctggttccacgccgagacagccggccgctttcaaatacaaagctgggtccggtttgactttttcaacgtcatcggaagatttgatgcagtcaaaataagcgagaaggccaagctggcgcaaatagcggtgcagccatttcctgtcagagcttgaagccagtccgactttaagcccgaggttcttggccgactttaaataatcttccacgccttcgcgggccgcgcctttttcgagccgttttaaaaacatttcctccagctcgtggtccagtttttctgtgtcaagcggctttttgatctgctcttcaagatatttaaacggcttaaaatccgaatgcgtgccaaccccctttccccatagttcaagcggcatctcgcaatcgtagccgcggaaaatttcacaaagcgcttcataatgttccgattccgtatccataatcagcccgtcgaaatcaaaaatcacagcttttatcatccgtaaaacccctttctgtttcccgtaacattatacgttaaaaatacttttcctcccagaatggttttgaaatcttttccaaaatattaaatcccatattccttcacaaagttgtaaattatttctagataatgccagtatttgacaaatctatgaaaaatatatgaactttttatgaaaattttatgaaacatggcggaataagggtaaaagacaatacatctatatttttttattgtaaaataggttagcaccataataaaggtgaaaaaataaaagtaccacctttttttcatttgcttttatttgtacactattttaccaaaccggaaggagagaaaaaatgtgttgaggaaactaccttggaaactggtgctgcttttgtccctcacatcgctctttttgctcggcggatgtgacaccaaaattgcagtgctcgacccacaaggcccaatggcgcgggaacaatatcatttgattgtttactcatccatcttaatggcctttgtattcgtcgttgtccttgggttgtatctttatatggtgataaaatacagggcgtcgcgtctgccggctgattataaaccgccgcaaatccacggccataaagtgctggaaacggtgtggaccattatcccggtgctgattattattgccattgccattccaaccgttaaagcaaactattcggttgaagaaacgccaaaatccatgaaaagcgaaaaacctttaacgatttatgtcacgtcatcggaatggaaatggattttcagttatccggaacagggcattgaaaccgttaactatgtaaacatcccggctgggcggccaatcaatttcgaattgacatcatccggtacgatggcatctttctggatccctgaacttggcggacagaaatatacgatgccgaacatgacgatgaggctgattctggctgcagaccaccctggcgaatatacgggaagaaacgcaaacttcaacggggaaggctttgcaaagatggacttcgatgtgttggcccaaacaccgaaagattttaatgcgtgggtgaaggaagtcaaaagcagagcgcctcaaatgaaaaaatcggattatgaaaaactgattaaaaaagaaggcctcgtaggaagacagacttacacgggaacccatttaaaatgggataaaccggatgaacaaaaaagctattatgaagaatcggaaaaaggtgagaaacaaaatcaccatcaccaccacgatatgtccggtatggatatgggcggaaaataatcattggaataggaggaaaacagtgtgaaacttagtgattttttcgtcaccggtgaaccggccatatatgccgccgaagttggcatggcacttggcgcggccgctgtgatcttttctctaacctatttcaagaaatggaaatggttatggaaagaatggctgacaaccgttgaccataaaaaaatcgggattatgtacattattgttgcggtattaatgttattccgcggcggtgtcgatgctttaatgatgagaacacagcttgcactgccgaaccagcatctgcttgatgccaaccattatgacgggatctttacgacccacggggttgtcatgatcttatttatggcgatgccgtttttgttcggcctgattaacgttgctgttccgctccaaatcggggcgcgcgatgttgccttcccgcttttgaacgcattcagcttctgggcaatggttgcagggatgtgcctctttaatatttcatttattatcgggggttcccctactgccggctggacgaactacttcccgcttgcaggcccggaatttacaaaaggtgtcggaaacaactattatgcaatgggcctgcagctttccgggatcgggacactggcaacagccgtgaacttcattgtcacgattctgaaaatgagggcgccgggcatgacattaatgaaaatgccgatgttcgtatggtctactttgattacttttatcatcgtgctttttgctttccctgttttgacagtggctttggcagaagtaacgtttgaccgtactttcggcgcacacttctttaccatgggttcaggcggcagcccgatgttatgggcaaacttgttctggatctggggccacccggaagtgtacattgtgttgctgccatctcttgggatttactcggaaattatcgctacattctcgggtaaacgattgtttggatatgcctccatggtctttgcgatggctggtatcgcattcttcagttatttcacatgggttcaccacttctttacaatggggaacacagcagtcgtaaactcgttcttctcgatctcaacgatgattatcgcgataccaacgggtgtcaaattatttaacgaaatctttacattgcataaagggaaaattagaacaacaacgcctatgctttggtcgcttgcctttatcccgacatttttgatcggcggggttacgggtgttatgctttccatggcagcagcagactatcaatatcacaattcatatttcctgattgcccacttccactatacattgattccggcagtcgcctatgcatgtttcgcagggctccactactggtatccgaaaatgttcggctatatgctgaatgaaaaactgggcaaaattacgttctggttgtggatggtcggctttaacctttgcttcctgccacaattctttgtcggcctcgacggaatggcgcgccggatgtacacttatgaagcaggacttggctggacaggttggaacttcgcctctacagtaggtgcctatatcatggggattgggttcctcgtcctggcttggaacattgtttacagcattaaacatggcgttcgcgacacgaccggtgatccttgggatggccgcacattagaatgggcaacccctacaccggttccggaatataactttgcgaaacagccggttgtctctacacttgatgcgttcgcagaatacaaagaaaacggcacaccgatttaccgggatgaagagtacaaaccgatccatatgccaaataactcggcaatgccatttttctccgctgtatcgatgggccttgcaggtttcggccttgtctggtcctggtggtggctcgccattctcggcggtttgatgatgctcggctgccttgcgtggagatcgtttgacccggataaagggcactatatcagtgtagaagaaatcattcgcacagaaaatacaagagcaggaggtgtaaaacgatgagcgacgaacatttggatacatcattgcccctcgaataccagcgcaatcaggaccgtttaaccattttcggtttctgggttttcctggcggctgaaatcactttgtttgcaacgctgtttgcaacgtattttacactccagcaccaaacagcaggcgggcctgctcagcaggacatctttgagctcaaaggtgtcctgattgaaacctttgtccttttgacaagcagttttacatgcggaattgccgtcttcaatatgcgaaaccggaataaaggcgcgatgctcggctggtttatcgttacccttcttctcggtttaactttcgtcggctttgaaatcaatgaatttgtcacgtacgttcatgatggggcaacactgcagacaagcgcattcctttccgcattctatttattgctcggaacgcacggatgccacgtttccctcgggattttatggggaatatcgattattatacaactgatccgccgcggtttaacgccgatgacggcacgcaaatttttcgttgtaagtatttactggcacttccttgatgttgtctggatctttatcttcactttcgtttatttaggagggttgatgaaataatggagcatcattcaaaatatccgatcggccatgtcatcggttttctgctttcaatcgtattgacccttgtggcactgtatgttgctttgtataccaacctttctaaaacggcgatcatctggacaatcggattgtttgccttcctccaggctggcgtgcaattatttatgttcatgcacgtcaaagaaggcgaaaacggaaagatcaatgtcagcaatatgatctacagcatcatcattgcgatcgtcgttgtttacggaaccatctgggttatgcacttttaaccaaaaaaacctgcatccttttagcggatgcaggtttttttatggcttgtctggacagacgcatttgcaaatacggccaaatcggcgattcttcccgagggccggtttatggcttgaacgcatcaaccggtatcaacccggaccggatggatgccttttggcgctggttatgccgcacttattgcgctgtataaccgccgtccacgagcagggcaatgccggttacaaattcattttcactgaggaatacgatggccttgtcgcaaggccggcgacggactgttcatcagatgcatcggcgcgaataaagcaaacatccgcccctttttctttgagttctttttcaaccgttttgccgctttcttcgttgtaatcggaaatcaccactttcgcccctttttccgtaaaagcttttgcggttgcaagcccgatcccggaagcgccgcctgtgacaattgcaattttattttctaagctggccattatgattccctcccattgtgagtatgtgcacattttcactataccgctttaaagtaagcgctgtcaattcttgatatcttttttacgaaaaacattttgcctggctggaattgttcttcagccgccactcccggttttccagcaaaaagcctggtaagcaggaaagctgctgcccgggatgcttttgcatcccgggcagcagcccttattctgccactttttcttttctttctttgctccgtttttcgagaatcatctgtttgaagtttttctgtttgtcttttggccatgatttgaattctttcaggaacttttcgtaatttggcaggacatcatcgatcgcgccgtattgcttaatttcccctgcttccagccacatcgctttctcgcaaaatttctttacctggcccatcgagtggctgatgaaaaagatcgttttgcccgcatccttgaattcattcatcttctcaaaacatttatcggcaaatgtctggtcgccgaccgataacgcctcgtcaatgacaagaatatcagggtcaacgttgaccgagatggcaaatccgagccgtgacttcatcccgcttgaatattttttaacaggctggtcaatgaactgcccgatatccgcaaattcaataatctgaggggtcagctctttaatctgcttttttgtgaacccaagcatcaggcatttcagttcaatattttcaaggcccgacaattcattgtttaagccggagttgatggcaatcagcgatgtttccccatataaatcaattgttccggttgtgggcggaataataccggtaatcaaattggacaaggttgatttgccggcgccgttaacgccgatcacgccgatgacatccccggtgcttgcctcaaaagaaatattctgcagggcgtaaaaatcatccccgtaaccgcccggcaaaataatatcgaggattttttccgaattgctccggtacattttatactttttcgaaacgtttttaaatctgacagatatgctcatagattagaactccctgttgtatattcaatacgattattataaagaaacaaatgccgttcgttaagcattatcgggattttttccttcgcgtaaaccataaaaacagacagacgccaatcatgattccgaagctgtcaaaagtgatgacatctataaaatgccctgttctgccgctgacaaaactttgatgccattcgtcaagattggcatagagaaaacttgccagaaagccggccggaactgcaaaacgggcaggaaccaaaaccgtgcgcaaagtcagaaggatcagcaaagtgcagacggcatattccgccacatggcaaaatttccggatccagaattcaataaaatcatacggcagcgttgacgttacaagcgcacccccgtaatagaattcgattttcggcaatgtgtttgcatcgaggcgtaccagcttttccagttccggccgcatgtcctgttccttatagggctggttggagaaaagaaacatggcagccataaacaggatacagagacctgcaagcaccagcgcgctttgttttttcttcatgagcaatggcaaagcctcctattcgctctttccattttacatgagtaagaaaaatgttgcatcctttttgggcgtttttcttccaacggacaaaaaaagaagccgcccttttcagccgtttccacggaagaaaaaagcatggcatttgccctttatcataagcaaaaaaaccgggacggctcccggcctttttggccctgaaacgttatgctccttttgaaaagcgatatcgttttgaatggagtgatccgctctcctatttttgtaccgtaatcgttttagcgtcgctccaaatgccgtttttaacagcatacaacgacaattttgcgcctgccttttgctttttgattttcacggtgaacctgccattttttccggcaacagcatggccgattgccgtttttccggttttgacatagactttggacccgctaagtgcagttccggtcactttcgttgcgcctgctttaacgccctgtgcggacggtgccggcggttttacggttgtggctgcggcctttcctgtatggcgcgctgcatcggttacatagacatacagttttctgccgatgcattgcggttgtatcttggccgcaaattccccgtttttaccggccttgccggttccgatcgttgttttgccggctttcaccgtgattttcgcatatggctctgctgtgccggttacctttttcgaaaaattggtgacagtccgcaaaccggaccggttggccggactctgttgaatcaaacagatacgtcccggccgaaaatgtgcatctgcccagaatataccatgccttattttttaagtaaagaaaaatcaggctcattttttcgcaaaatttctgcaaatgatgcctgtttttgcagaaagggaaaatcgtactgaacctgcatagaagcgggaaagaagatccggcgtacatggcagggcggcaccaatacaggcggttcctgagagatggccggggcgctgaaaatgagccttgtcctttgttgtgagggagccgattatggtgttctgcatcaatctgccgcacggcgaaaaaacgccccggacgtcagatccgcccggggcaccctatgaatacaattaaagcatacggtttacgagattcatcacttcatcgcttaggcgtttgttccgttgttcgctctccgcgagactgcccgctttcacgccaaagtagaacttcactttcggttctgttccggacgggcgcatgcagaaccatgaaccgtcttcaaggaaaaatttcagtacattggactttggcagttcaatttttgacgtttctcctgttttggcgttggtccgcacttgcgattgataatcctcacgggcggataccgggatgcccgccacttctgttaacggatgggcacggaagtcggcaaggatgccggcaattttttccgatccttcttttcctttcagggtgagcgatgttaaggattccttatagtagccgtactgttcgaaaatgtcgagcaggccttcatacaatgtttttcccatcgacttatagtaagcggccacttcagcagcaaggaccgccgactgcaccgcatctttatcgcgcacaaaatcgccgattaaataaccgtagctttcttcatacccaaataagaaagtatgagcaccggttttttcaaactctttgattttttcaccgatgaatttaaaaccggtcaaagtgtcgatggtcgggatgccgaaagaccgggcaatatcgcggccgatttcagacgttacaatcgttttgatgacaataccgttttccggcagagtcccttgcttttgtttttgtgttaaaagataatggagaagtaatgcgcctgtctggttgccggttaaaacctcgtattttccttcatggttttttacggcaacgccgaggcggtcagtgtccggatccgtgccaagcaaaatgtccgcgccgatttcttcgccgtagcggatggcaagttcaaaagcggcatgttcttccggatttggcgattttactgttgagaactcggaatccggcagctcctgttcttttacaacggtgacgttttgaaaaccaaaattttcaaggccgcggcggaccgggagattgcctgtcccgtgcagcggcgtgtagacgattttaaaagaatctgcaaccgagctgatcacttccttgttttggcggagtttgatgagctggtcctggtaagctttgtctacattttcgccgatataaacgagcaagcctttttcgatcagatccttttcttcgccgacttcgacaagcagctcattttcgacacggttcacatagcctgtcagttcgtccgcttcttttggcggcatttgcccgccatccggcccgtaaactttgtagccgttgtattctttcgggttatggctcgctgtaatgacaacgccggcataagcgttcaagtaccggaccgcaaatgacaaaagcggcgtcggatggagggaatcaaataaataggctttgatcccgtgctttccgagcgtttttgcggtttcaagggcaaactccggcgatttgcgccttgaatcgtaggcgatcgcaaccccacggtttatagcttcttccccctggtcgagaatgaagtttgccagcccttctgatgctttccggactgtataaatattcatgcggttcgtgccggcgcccagttccccgcgcataccgcccgttccgaactcaaggtttttataaaagcggtcttccagatttttttcatccccgtttacgccggatagttctgcttttaatgcggcatccagctctgcaaagcggttccatttttcataagaagttttccaatcagtgctcatgttggcctcctgtaaaaaattttctatttccatattagcataaatttgttgaaatcccagaccttaatgcatgagaaggcggattttcccgcatctaacttttatagcggctggaaaaaacgttgctgtagacccaccctgcacttcattgttatgatagagaagtaaaccaaatggaagtgaaagcaatgaatgaagaaaaataccaaaatttaaaattaggcgagtacggcattatgatcagcatggcggcctatttaagcctgtcggtgctgaaactagtgattgccttctatacggattcaaacgccctgaaggcagacgggctgaacaatattacggacatcctgtcttcgatcgccgtcctgatcgggctccgcctctcccggaaaccggcggaccgcgatcatccttacgggcactggaaagcggaaaacgtcgcctccatggttgcttctctcattatggtggcggtcggcatccaagtgctctatgatgccattctctcgattgtgcatggaaaatccgaatccccggatatggcagcggcatggaccgggttactttgtgctgttgtcatgttttttgtctatttgtacaataaacggttatcaaaacgcatcaacagccaggcggtgcgggcaagcgcgatggataatttgtccgatgcctgggtgagtatcggcgcgagcatcggtatcatcggttcgcagttccatcttccgtggcttgacccggcggctgcgattgttgtcggcttattgatttgcaaaaccgcctgggaaattttccgcgatacttcccatcttttaacggacggatttgatgagtcggagctggaaaattataaagcgaaagtattaagcgtagccggcgtccaaagcgtgaaagacattaaagcgcggcagtacggaaataatacagtcattgatcttgtcatcggcgttgaaccgtctcttgatttgcgccatgcccatgacatttcaacaaaagtggagaattcattgattcgcgattgtgaagtatatgaggtcattgtgcatgtagagccggcggaaagttaaaacccggactcgcaagcatgccagctggtaatggaggtacattcgaaggaaaggtgaaccctggaatggcggaatggcctcaagacgccagccggtgcccttatccattcaaccagcgctttttgcggttgttaaaaaggatgcgcgagtgccacgcatccttttttgttacatttttacaattgtccggccctggagcttgccttccaaaatatccgaaagtgcggccgggacttgctcaaggctgatttcccggacaatttcactcgtcaaatgttccggtttgaattcgccggcaagtttttcccaaactttcacgcggagatccatcgggcaaaaaacagaatcaatcccgatccagctgacggcccgcccgagaaacggggttacggttgttttgacttcccttccgccggtgaggccgctcgttgccaccgccccgccgtactgcagggagctgatgatgtattgtgtcgttttcccgccgacgggatcgacagccgctgcccattccgttttgcggatcggccggtcttcatggtccgtaacggcttccctgtcaaggatgcgggtcgcaccgagccgtttcaaataagcgtgtgcctcttttttcccggttgaagctgtgacctcataacccctttttgccaaaatatcgacagcaacactgccgacaccgccgcttgctccggcaacaagcaccggcccttgtcccggtttgagcccgtggtcttccagtttttgcacggacagcgctgccgtaaagccggctgtccctaaaatcatggattctcttaatgtcagccctttcggaagcggtaccacccaggcagccggcacgcgcgccatttcactgaatccgccgaaatgcccggtgcccagcttgtaacttgtgacgatcacttcatcgccttctttaaagcggctgtcagcggacgcaagcaccgtccctgccaaatcaatccccggtataaacggataagatttgacaaagtcccctctcacgccaacaagcgcatctttgtaattgacacttgaataggcaacttttacggtgacttccgcgtccggcagccggcccgtatcccattcctgtacggagcatgccggctgtgatgcattttccatgaccaacgcacgaaaagtttctttcaatgcaaagcacctctttttactcggctcttgtcaagtcaagattgtattggtaaacttcctgatctgaagaaagtttgtaccctttattcggattgtaatcgatgatgactttctcaccgagctgtttttggcttgccttcgatacaaggagcggaatgccataaactttaaacaaatcgtcatcttcccgtttatggtcaattttcaaagaatgttcagcggcaattgtacagctcccgacaaagaccgcctcaatccggatgccttcgccttcttgaaattcaatttgtttaaattgggagagtgcagcgggtttgatatcaatttccatctttctcacctttcttttacaaatgattacattatcgtacccgcttttcccttttgtaaaacaaaaattggcacatcttttatcgttcggcaagtgccgggcattcccttctttttttgggcacgtgtctgaattcccgccctgcacaccccgttcctttttccgcaccggaaaaaggaagctaagaatgtttccatttatatcgcaaaatccggcataaaaagatgaggctgccgacattccgcttccacagccgtttcggttcgcgcaacagccggaacagccactcgatccgcaatttccggaacagatacggggcacgcggtacgtttccggatgcaaaatcaataaaagcgccgacaccgagccgtgccgtgcagaaaagttcccgatcgaagccggcaatgaatttttcctggagcggcacgcccattccgacgatcagcacatcggcatgcgagcggttaatctcctctacaatctcatggtttgattgaaaataaccgtgatgggcgccggcaattttcaaaccgggatagtccctgcggaaatgttggattgcacttttcaaattcgtttcggtagcgccgagcacaaatacggaaaagccgtttttttcacagcgctttaatattttcggcgtcaagtcggtaccgtttaaattgccggcaagcggaatatcaaacagttttgcgccgatttcaatcccgaccccgtcgttgagcaggtagtcggcttcattgataatccggtagtagtcgcggtcggtttgggcgatattgtaacagtgcgcatttaaaaaaaacacattggttttaattccttcgtgtacccggctctcaaattcgcccaaaaattgttcttctgtaatcacggtcaaatcaatattgccaaatgcctttttcaaaacagttttctccttagcatgttgaaatgtttccatgtttagtatatacgttctgtgcaccgccggcaattacaaatccccgctccgccaacgcctgtggcaaaaagggaagacccgcagcatgggcgatatgcggtggaattttggcgttccccgcagacgggggctacgaaatgaaactggatggaaatccggacgtgaaacagttatgttaaacattggaaaatggcaaggaagagccggccggggttaaaaagcggatacatgccagcaaaattagtactggttttgctcccggaattcttttggggtgagccccatatattttttaaaaagcgaagtatagtagctttggttgcaaaaatggaacagaagcgcaatttcagaaatgggtatattcgtatggagcaaaaaataaatcgactcttcaatccgctttttatttatataatccgtcaccgatacgccggtctcttttttaaacaagtgggacaagtagctcggattcaggtaaacatgttttgccagcgattcgagcgtgaccacctgtaaaatattttcatgaatatatgtcacagccatatgaatcgcatggctgtagcgatgttcctgtttccttgcctgccggacggtttccgtaaaattgcgcatcatgctgtactccaattcaaacagcttttcctgcgtctccatcctttcaatctccaaaatatgcgcatcgctgatgttaaaagcggtttccggcggcacgcccgcttcgatcgccgccctcgtgaacagcgtgcaaatgcagatgagagaattacggagcgagcggaccggtacttccgcaagttttgcccgctccagcgtattgatgtttttcaaaacggattcggctgcttccactcttccttcttttacagcattcaacaactgcttttccatcatataaggcggatgcagaaaatactcgcgctggtgttcaacgcggtatgaaaggtagcgttctataatggatttgctgatggcagactgtttcatcggagccgcccctcaatctaaaaattttattatagatctaaagatttcaatatcattgtatgcgcatacatggtaatattcaagtgtaagcatcaaaactaaaggggggctttaggatgtggaaaaaagcgggcgttattttggcagcgcttacgcttgttgtgggcgtgctggccggctgcggcagcaattcaagctcgaaatcaagtaaaagcggcagttcctcaaaaaagattgtgttaaaattcgcggcacaaaatgacagtacacctgcgacaaaagcagtcattgcagcttttaacaaacaatcgaaaaagtaccaggtgaaatgggtgcaaatgacgaatgactcggcacaaatgcacgaccaattgctgacttcgctctccagcggatcaagcgaatatgacatcatgtccatggacgttgtatggggcggcgaatttgcaggtgccggataccttgtcccgattgacaagaaaatgatggatgctaatttgacgaaagaacagttcaatgccggttcgatggcttccggtaactatgaagggaaacaatatacgcttccattcttcccggacctcggcattctgtattaccgttccgatattgtcagcaaggaagatgctgcgaaactcgaaagcggggactacacctataaagaactcggggacatggctgcaaaatatgccggcaaaaacggaacgacaaacggttttgtttatcaatccaaacaatatgaaggcttaaccgtcaatgtgacagaattcacgaatcattataaagatatcaaaggcggccttgagacgatgtatcaatttacaaaagcagcatgggcgccaaaagatttgctaaactatatggaacaacaaacgctggacagctttgcgcaaggaaaatctgtcttcgcgcggaactggccgtaccagtatggcaccattaaaactggcggagaaggcgtaaaagtggacatcaaaaatgttggcattgccccgcttccaaacggcggcgctgtcggcggctggcttctcggcatcaacaaaaactcaaaacatgtagaaggcgcatgggagtttgtaaaattcgtagccggcaaaaaagggcagaagattatgtccacaaaaggcggttacctgccgggatataatgatttgctgaatgatcctgatgtccaaaaacaaaacaaaatgctgaccatgccgggcttccaaaaagcattgaaaacgacgattgcccgcccggtatccgcgaagtacagcaaagtatccgacacgatccaaattgcggcccacaaatatttaagcacaggccaaaatctggatgatgcagccaaaacgatccaggacgcagcaggcgaataagcaaccgtccaggggcgcgttttactccctttccgtccccgggcgcctgcttttcataatggtttgatatcggcgaaaggctctattcaatagagccttttttaaaaagatatgagggggcgctgcataaactgtgcatcctccgtacgggaagaaacattacggtgaaaagaggtgccagcatcatgaagaagaaccgcttgcaggcttttttatttatccttccagccctgctgattatcggcgtattctcgctgtggccgatttttcagtcactccgctataccttttttgattatcagctgaataaccagcaaaaatcggggctgtacatgagcccgcgctataatttcgatttatttgacgaaacgcaaacgtatgtcaggctgtttctgacagaagaccgggaaaaaatcaccaacccggccgaccggcaaaaagtcgacaagctggtccatcgcgttgccgatgttgccaagcagtataaaggcagaaaaggcgtccaaaaaatcagccaggccgaccagaaaaagctgatgggcctttataccgactcatccaaactggtaaaggaaatcaatgccaaatacaatacgcaaaacggaaaaaatttatcaaaaattgttaaagatttcaaaagcagctttgtaccctccaacttcatcggcttcaagtcttataaagaagcattgcatgacaaacgactcgggcatgccttatggaataccgtgctctttaccgtcgtttcggttttccttgagttcgtcctcggcctcggcctcgccatgattatgaacaaagcgttcagagggcaaggcattgtaaggacaacttcgctgatcccgtgggcaattccgaccgcggttgccgcgctcatgtggagttatttgtatgacggcacaagcggtgttgtcgcgcattttttccaatccatagggctgatcagcgattcgcgcattctgcttttaacgggatccggcgcgatggtatccacgatcttagccgacgtttggaaaacaacaccttatatggcccttttgctgcttgccggcctgcaaaacatttccaaagggttgtatgaagccgcatccattgacggcgcaacaaaaatccagcaatttttcaaaattacgctgccaatgctcaaatcttctattttagtcgcactgctgttcaggacacttgacgcttttcgcgttttcgacctgatttacgttctgacaggcggcggtccgggcggggcaacagaaaccatgtctgtctacggttacaaaacgatgttcgggcaaaccaacttcggctacggctccgtcattgtcatcatcatgtttatttgcgtcgccatcatcgcaaccatttacattaaagtgcttggcgccaatctgatggataaaaactaaggagggatggccatgaaaacgaaccgcaaatggaatgtgctcatcatcgccctgattgccgtatttttatttgggatgatatttccgtttttctggatttttatcacctcctttaaaccttccggggaaatttttggggacggggcttttcgggtctttgcccatcatccgacatgggaaaattacacgcagattttccaaaagggaatcctgacatcggtgaaaaacagttttatcgttgcgacaacgacaacggtttacattattttaattgccacgtttacggcttacgccatttcgcgttttgattttaaagggaaaaacttgttgctcgggctgattctggcggtttcgatgttcccgcaaatgattgtcaccgggccgatttataacttgttcctgcatttgcatttaacgaactcgtatgcgattgtcctgccgtattcgacgatcaccctgccgactgcggtatggatcctagtgacgcatttcaaccagattccgctcgcgcttgaagaatcggcaaaaattgacggtgcgacgccggttcagacgctgttccggatcgtcttcccgcttgccgcgccaggtgtctttacaactgcgattattacattcattgctgcgtggaacgaatttttgctgacgattaccttaaactcagacgctgactaccatactgtgccggtcgcgatttctttcctccgtacccagttccaaattctttggggacaggtcgcggccgctaccacagtcgtcacggtcccgaccctgatcatcgtccttctgttccagaagcaaatcgtctccggccttacaacgggcggggtgaaagaataatttcacatcccccgtactgcaaaaaaggaacacgttgagccggcaggagatccgttgttgcccgccggctgaatcataaagaagatgaagggtacttgcatcatgccctctatgaatttcaaatttttggaggaaccgcgtatgacatgggaaatggcaaaacacgaatgtgacaaacaaatgctgctggtcaatgaaagtttatttgcgctcggaaacggctatcttggcgtgcgcggcaactttgaagaaggctacccggaagaaattccttccatccgcggcacatacttgaatgctttttatgacattacagacatcgaatacggggaaaaagcgtacggatttccggaaaccgggcagaaaatgctgaatgtgatcgatgcacagaccgtcgaaatttttcttggggaagaacgcttctcgctttttgaaggggaagtcctcggtttttcccaaactttgcacatgaaacgcgggttttccgaacgtgccatccactggaaatcgccttccggaaaagaaatcagactcactttttcgcggctcgtttcttttacacaacgggaactgtttgcgattcaagtgaaaatgaagccggtgaacttttccgggccggtgcgggtgatttccactgtcaacggtgatgtgcaaaattatgtcgatgcaaacgacccgcggaccggatctgcccatgcaaaaaggctggctgtgacaaaagctatagaggaaggcggcaccattatactgcgtgcccgcacatttgcttccgggcttgaaacggcctgtgccgtaacccatactgttaacgtcccttgcgaatgccgttatgaacaagacgaaaataaagtgcgcgcaatcatcaatttcaagcccggccaaccggtatgctttacaaaatttgcgatttacacggacacgctccgccacgggggccatgtcgcagaaaaagcggcggacatcctgaaaagcatgcaagggaaagatttttcagcactattacgggagcaggagcaatatttagccgcttactggcaagcagcggacattgaaattgacggcgatccgaaactgcaggaagggatccgtttcaatctgttccagctcctgcagtctgccggaaaagacaccgccagcaatattgcggcaaaagggctgtccggcgaaggctatgaagggcattatttttgggatacggaaatttatattttcccggtctttcttttaacgtatccgcaaattgcgcggcatttgctgctgtaccgttaccatatccttgaccacgcacgggcaagggcaaaagagatgggccatcaaaaaggcgcgctatttccgtggcggacgatctccggcacggaatgctccccgtatttccctgccggcacagcgcagtatcacatcagcgcggacattgcttacagctatatgcagtactggtatgccacacaagatcaggactttatgaaacaatacggcatcgaaatcctcgtggaaacggcgcggctttggcttgaggttgggcattaccgggaaaaggacggcaaatttgcgattgaagatgtgaccgggccggatgagtacacggccatcgttaataacaattactataccaatgtgatggcaaaatacaatttaaaatcagcgcacaaattttactactggctgaaagaaacagatgcggccttttttgcggcatttgcggcgcggcttggcttaacggacgaagaagcggcaagctggcggaaagcagcggatgggatgtatctcccttatgatgaaaagcgcggcattcacaaacaggatgacagctttctcgataaagcggtctgggattttgaacatacgccgaaagaccattacccgctccttttgcattatcatccgctcacgatttaccggcatcaggtgtgcaaacaggcggacacggtacttgcacattttttgctggaagaagaggccgatccggaaacgatccgaaactcatatcattattatgaaaaagtcacaacacacgattcatcgctgtccacttgcatcttcagcatcatggcgtccaggctcggcgaaacgaaaaaagcgtatcaatattttatcgaaacagcccgtcttgatcttgataacacgcacggcaacacaaaagacggcctgcatatggccaatatgggtgggacatggctgtccatcgtgtacggattcggcggcgtccggatcaaagaaaatgggcttttcttaaacccggccattccggaacaatgggaccgctatttattccgtctcacctaccaaaaccgcaggctccgggtggaagtcacgcgccatgcgttcaaagtggcattgctggaaggagatgcgctggacatccatatcggcggccggacagaaacgctgcaaccaggcaggacgattacccggccgattcccggattgtgaatacaggcgttttcattgcacaaaaaatagaaaaaagcggcgggaccctttttacagtggtttcccgctgcttttttcggaacttctgaacgaatcgggctttaaccggcaacagttggcgtttcctgctgaaggaatccggcttctatttcactggtgtgccagctttcgtgtatgaaaaagcctgctcaaaatcggcaatcagatcatccggattttcgaggccaaccgataagcgcaacaagctgtcggagatgccgcgttttcttcggtcctcaggcggcattgcggcgtgggacatttttgccggataagacaaaatcgattctacagcaccgaggctgacggcaaaaaccgggatttttacatggctgacgaatgcccgtagcgcctcttcatcttccagttcaaacgacaataccgcgcccggcccttgtgcctccagcttttgcaatgcatgctgtggatggtgcccgagccccggataatacacgtttcgtacaagcggatgcgcatcaagaaaacgtgcgattttcaccgctgattgctgcgattggagcaaccgcacatgcaacgttttcaacccgcgcaaaacgagccatgcatcctggacgccgagtatcgccccgaacgagttttgcaaaaagccgaggcgcgctgccaatgcttcatcttttacaactgcaagcccggcgacgacatcgctgtgccccgctaaaaatttcgtcgcgctgtgcagcacgatatccgccccgagttcaagcgggcgctgcagggcaggcgttaaaaaggtgttgtcgacaaaggtgagcgccccggtttcctttgccagttcactcaccgcacggatatccgtcacttttaaaagcgggtttgaaggggtttctacataaaaagctttcgtgttcgggcggacggcctgccgcacttcttcaaggttggtcatatccacaaatgtatgttcaataccaagccgtgtcaggacttctgtcaccatccggaacgtgccgccgtacacatcctcggtgatcacaacatggtcgcccgccgacaaaagcagaaatgccgttgaaatcgccgccatcccggaagcaaacgcgaaacctttggcgccgccttcgagttcggctatgacatcctcgagcgcttccctcgtcggattgagcgagcggctgtaatcgtatttgccgaactgatcaatgtccgcctggtggtatgtcgaagcatgctggatcggcacactcaccgcaccggtcacctggtcaattttgtggctgttatgtaaaagcctcgtttgaaaagaataatcttcatttgtcatcgtgtttgcaccccttcgtgaatgttggcaaaagctttttcaatatctgcaatcaaatcgcggtcatcttcaattccgactgaaaagcgcaaaaggcagttgtccacgcccgaggcaatccgtttttcttccggaatgtcggcatgcgtctgtgtagccgggtaagtgataaaactttccgtcccgccgaggctttcggcaaatgtaatcagagacaggccgcgtaaaaacgggtcaatccatgattcttcttttacacggaaagaaagcatcccgccgcggcccggatacagcacatcttttacatccggatgcgcgcttaaaaaggccgccacagcttttgcattcttttcgtgtttttccatccggagcgccagcgttttcataccgcgcatcaaaagccatgaatcaaacgggctgagtgtggcgccggcaccgttatggtacaagaaaagcttgtcgcaaagttcagcgccctttgccacgatcagcccggccagcacatcgttatgccctccaagatatttcgttgcgctgtggaccacaatatcagcgccttctttaatcggctgctgcaaaagcggggtgtaaaaagtattgtccacgatcagcaggattccgtgccttttcgcaatttcagccacagcgccgatatccgtctgctgcatgagggggtttgtcggtgtttcgagaaaaatggctttcgttttcggggtgatttctttttcaatattttccgggttgcaagtattcacgtacttacaacaaagcccccattttttatacccctgctccagcaggcggtaggtgccgccgtataaatcatcactcacaatccactcatcgccggcctggaacaaagataaaacagtgaaaatcgcagccatgccggaactgcacgcaaacccgcggtccccgccctccagatccgcaatcgcttcttccagcaactggcgtgtcgggttgccggtacgggaataatcaaaaccggtcgactgcccaatgccttcgtgttggtaagcggtagaaaaataaacaggcgggttcaccgcacctgtcacgcggtcactgcggtttccgatctgtgcaagttttgtttctgtacgatacatgatggacactccctcaaataaagttaaaaaccttctccaataagaagaaggccattcctttcgtgcatgaaccatcttcttatctttcaagttatggatcccataacttgcaggacttagcaccttttcaacgcgtaaaagcattgaaggttgctgaggcttcatcgggccattccctcaacctctcttgataagaaaatacgagtatgaaatttgccataaacaccgcaaaagccattacacaacggacttaaaaaatgcttatgttcaatttatccccttttttcggattcgtcaagcttttttaaaaaatttccaatttaatttttatcatttgtctatatagtttggaccaaatcctgaatatggagcatggcaaccggtttctgggcggcaacaaccggcaacaccttgaaagcatggtcttccattatccgcaatgcttccgctgccagctgatgctcactgacgcaaaccggatattttgtatacaaatctgctacttttttgtccagtacttcatggccgtttaaaagctcacgccggatatcgccgtccgttaaaatgccggccagccgtccccgatcatcaataactgaaacagcccccgcccccgcttccgtcatcataaataatgcttcctttatgccggtgtccattccggcaaccgggttcatgcttttccgtttagccacatggccaaccgtgagaagcaaacgccggccaagcgagccgccgggatggaagagcgcaaaattttccggtttaaagtcccttgcctttaaaagggctaccgcgatcgcatccccgagcgcaagcgtgacggtggttgtagaagtcggcgcaaggccgagcgggcacgcttcctcaacttccccgatatccatcaccagattcgaacgccgcgccagtgtcgacttgcgtgaaccggaaatggcaatcatttttgcgccgatccttttgatggaggggatcatatttaatatttccgacgtttccccgctgttggaaatggcaatgaggatgtcttcttttgttatttttccaagatcgccgtgcagtgcttctcccgggtgaaggaaaaatgccggggtaccggtgcttgcaaatgtggaagcaagtttccggccaatgatgcccgatttccccattcctgtaaaaatgactctgccttcgcacgacaatatcatttcaatgccttcatttatacgaaaattgatccggtctttcagctttaagatctcattggcttctttttccagtacttcacggacgctttcgacataattgatgcttcgtttgaaatcttttaacatcctattcacctccgttaatggatgtttgctgccgtttgttcttttatcatgcgatcaatttcaattattggctttaacatttcttcaatatcatccagtttcaccatattcgggccatccgaccaggcctggtccggatcaggatgggcttccagaaacaacgcatcgatcccgcatgccgccgctgcccttgccagatacgggacaaacgcacgctttccgcctgttgaagtgccgtttccgcccggaatttggacactatgggtagcgtcaaacacgaccggataccctaatctgcgcatttccggaagtgcacgcatatccaccaccaggttattgtagccgaatgtcgaaccacgttctgtaaggagaattttttcggtgccggattcttccaatttttgaatgacgtttttcatatcccaaggcgccaaaaactgcccttttttgacattcacgattttgcccgtcgcggcggcggcaagcagcaaatcggtctggcggcaaaggaaagcggggatttgcagtatgtcgagcacttccccggctgcttttgcctggtgcggctcatgaatatcggacgtgaccggtgcgccaaatacatttttaatccggtcaagtatttcgagccctttttccagtcccgggccccgtttggaaaaaatggatgatcggttggctttatcgaaagaagctttaaaaacgaaaggaatgccgagttttccggcaatggtttgaagggttgcggctgtttccatggccatcgtttcactttcaattacgcacgggccggcaatcaatacaagcggtagacgttggccgaaagctatccggctgttcagttggaccgttttcatttgctcactcctcattgttaagttttcacgtgtctttactccttctactgcaggttacaaatattatcctttaggaaaccgcacaggacaaggaagttgtaaaaaatattcacaaatttttttcgcttttatgtaaagttatctccagaaataccaagcacaaaaccggacaagttttgtgcttgatgacatggatggcgggtaaagtatcctttgaggcaatggattggaaaatattcctttgtaaatggcggcggcactgagctcattattttatacatgccattaactcatcagccgttttgcttttgatgattttttgcacaacgtacctgttttcaataatggaaatgagtttttcatacataccatctaaatccgtttgcgtgccttctttaatatttaacaggcaaacaaattggaccttttgctggtcatgccagtgaatagggctttttaacgtgcatactgtccaaaacgtctccttcgttacgggcaccattggatggggaatggctacgagattcccaaaacaggttggcgtaatcgactccctttctaaaacaaggtttacataatcccttggtacaagcttttgcttatatagttcatcacataaaaatcgaatcacgctttccttatcccgcaattccagctggagaaaaattcttgaaggatgtaaatacttttctgctacattttgtgtcttggataaaaaacattttatcgcatgaatgtccttatcttccaaaaaagtattcacaacttggaccgggacgcccaaattttcctttataggaatcgtactaatgatcagatcaataaaagataaatcataggatgacaaattgtagtaattaatggtatcggcaatttcaatttcttgcccatacaaattttttaaccggtaggacagcaattttgcactccctacgccggatgcacaaacgataagtaccttttttatttttttcttgtttaatttcattcgttcaagggcaactccaatatgcagcgcaatataagcaatttcaccctccaccacttccattcctaaatattcttctatacatttgccggcaatgatagcgccttcaaaagcagctgggtattttttctttatatcgtttaataacggattccggatattcatcttataccgtaaccggttcattgcaggacgaatatgcagcgttaacgactgaataaactcgcggtcttggcggaagtcccaattcaattcagactttaaacgatataacatacaattaataatcgttccggcttcatcaaatttactaaattcggccagctcctttttgtgtaaaagtttggttcctaataaatgaacaataatataatcgatttctgtcttaggaaaggctaacaaagtgaaagcttcaacttcttttataatttcattcgccacaattttctcaaatggataatcatcgaccaaaacatcagccagctcttcaatgacaaaaccttcccggattctccggcaggcaatggaaatattgttttttgcaagaaaaaagtgcagagtattgcagtatataaattcgtttataccgcataaaaattcaatctgaattctcgctattaagggcttgacatggagcctctgcagccatgattcttttgccaagcggccagctgtaacagatttggcaaacccaaacaggttatcatggctacccctccatgtaaagcccctctgcataaccatttgcatagaaattttgcacatctctgcactttaattttgcaataaacaggaaatatgtgtcgctaaattttccaaagatatatcagagatttcaatcttatatttattgaccttttggacgattatttctttaatctttttaaatagttccggatcaataagctgtaaacattcttccttcagaaatgcctcctggttccgctccagtaataaatttgacaaacataatcgtttcatatattcgtccccttccactttcgacccgtaatggggacggttgattagctttaagtgatattgatttaaaattttctttacgtccttcaagtcattttgtaatgtcgacaaagagacatacatctcgtctataaaactttcaattttaacaaaatctgtttctaacaataaccggcgcaaaatatagagcactcttgtgtctttatcagcaaaatcccccgctaattggggttcctccgcagaaatctcatggaggacttttgagaaaagcccggcatctaatacttttatgctatatcctaaacctctggtcgattcaatttgaaacccgtttgagtccatattattttgcatgagcttcatttcattccgtatcgtccggtcactgacgcccagttcttttgccatccagcctgcagtaacgggttcttttgatttggataaaaggattaagatatctttctgccgtcttgataaattagacaatgccaacaactcccttttatcattgattactacaatttttggcaaagagaaaccattttttcgggctgtgatgtaaacgttgaaaaaaccaatgcctttatccttgtgcagcctgccttatcgtagttagggcttgctgaacgaatcaaatttggtcagatacaagccaaattccgattatcaaaatataaaatagtgttgtgtaaaaatttcaaaaaaagaaccctgagcttgcgctccagattcagtatgaggaattgaagggctactactgtttcgctggtctcctgaaggcgtgctcgaataaggcccagcccatacttgcgcttgccttcgccaaatttgccttcaacggcattacgttcagaggcatcctgccttgcgacgccttccaaggttttgtcttccgnnnnnnnnnnnnnnnnnnnnnnnnnnnnnnnnnnnnnnnnnnnnnnnnnnnnnnnnnnnnnnnnnnnnnnnnnnnnnnnnnnnnnnnnnnnnnnnnnnnntgaatttcttctcgaaggacttgacatacttttcttcggccatccaccaaggaatcatttcagcaagacggacccagcgattttctttatttaatttcccaccgaatggtagaaaaaaatcatctacaaaagttaattgatgttcggtctttttgtacatcgtaacagcttccaagtgcaaggttttttacgtgtttcctttgaaatccttacactttatattcgacaaaagtagccaaaatccttgtcaaatctggaatttttgcttattcagcaagccctagttaccttctgcacctattgccgcctgagatttctattcttcccgtatatgaaaaaatggagttttagtgaaactccattttttcaccccaggattgaacatgggttttattttaaatgtggaaaaacggccgtcctaaaagttaaagatcttcaccatttgtttcaatgacatgcttataccatccaaacgactttttcttttttctttctaaagttccgtttccctcattgtctttatctacgtaaataaaaccgtaacgtttttccatttctcctgttccagcactcactaaatctatacatccccacggtgtgtaccccattaaatcaacgccgtccagttcaaccgcttttttcatttcctgaatatggtcgcgaaaatattggatacggtaatcatcgttaatcgtgccatcctcttcaacggcatcccgcgcaccaagcccgttttctacaataaataaaggaatattgtacctttcatataaagcatttaatgaataacgaaggcctaccggatcaatttgccaaccccaatcactggcttgtacatatggattgcggacgacgcggccaaactctccatcaggctggctatcttctacttcacgggcgctgactactttagacatataatagctgaatccaatgtaatctactgttccttctttaagaatttgttcatcttcctttgtatattcaatttcaaatccgtttctttcccagtattttttcgtataatgaggaatcgccccgcgaacatgtacatcaccaaagaaccagcgattacgcattgcttcagttgcaagcatcacatcatccggatggcaggaatatggatatacagggacgaaagaaagcatgcaaccaattttaaaattcggattaattttgtggcctaatgtaacggcttttgcgctggcaattaattcataaagcgctgcctggtacatggtttgtttccggttttcaccttcttcgtatttaattcctgagtttgtgaagcttgcgaaatccatgctcgtatctgcttgattattgatttcgttaaaggtcatccaatattttactttatctttataacgtctcatgactgtctcagaaaatttcacaaagaaatcaatacacttccggtttctaaaaccgccatattttttcaccagatggtaaggcaattcaaaatgagatagggtaataacaggttcaatatgatattttaataattcatcaaacaaatcatcgtaaaattgcaagcctgcttcattcggctccggatcgtccccgttcggaaaaattcttgtccaggcaatcgaagtacggaaacatttaaaccccatttcagcgaacagtttgatatcttctttataacgggaatagaagccgattgcttcatggttcggataatagtaaccttccaatacaccatccgtaatttgccgtggaacaccgtgccttcctgcagtcatcacatcagcaacacttacaccttttccgcctttattccagccgccttcaagctggtgggctgctactgctccgccccataaaaagttttctggtaaaacgccttttgacattgtaaaccctccatcatttatcttatttggtttcctgaactagaaaagttaaataagaaggcgattttcctatgaagaaccgccttcattcattcacccgcagtgcaacatcgttttcataggatatttctacatcttattcttctattccaagattaggatcagagtacagattctccacctttttcttgttcaactaacttcttatcatatattctgatgaacggaagatatatgataaacgcgaccacaccacaaatgagtgagacaactggcgccataatactcccgcctgttccaacgaaagccccgataccgattggcgttggccacggcacttgggcgataagtggcgcaacaatgtgcagtttgatcgcaaaataaccaattgtagctgtagccataggtgctaagaagaacgggatagccaggtatggattataaacaatcggtagtccaaacaatattggttcattaatattaaagatgccaggagcaagggatgcttttcccagtattctcaattgctgtgaccgggctaaaaatgcaataaagatacataatcctaaagtcgatccggaaccgcccataatgacaaatgaattttggaactcgccggcgaatggaatatttgccccatgaatattggcttccatatttgccaaagtaataggcgtcaggaaggctccaataatattcgccccgtgaatgcctacaatccagagtgcatggattaagaagtaaatcaccatcaatcccagccagctgcttgcgatatgcgtaacaaagctgaatggaacagcgacaactttaaatatatctgtgcctaaagctacaaaaataccattgatgattaagatcacaaaagcgactaaaaaagcaggaattaaagctgtgaacgatctggataccccttccggaacagcttccggcattttaatcacccaattttgttttacacataaccggtacaactgtacagcaataacagaaacaataatggccgtaaatatacctgaagaacctaaacggcttacaccactgtcacccatttcccaaccgaaaataatatgggtggtgtcattcattttttgtacaagtgacatttttccaccacctgaaaccaattccggaatcgtcatgaagaaagcaaacatggataataaagccccatttagcgggtttacatttatcccttcttcttcagcgtatatttttgtatactcataaccaataacaaggttgaaatataatgctaaaattcccattgttgctttattcgccagcatatacaagtcactaattctaaagaaagtattatcgaaaaaaccttgcaaaaatgttaaagtctgcggcaatacgttcaacaccaggaacattgaccctactattgtaaatggtattgaagccatcccggctgccattaccgcccggacaaaacgaaaagatgcaattttccccataggacccattagatacttttcaagaaaagtaaatgccttattttgttctgacatatagacccctcttttctattgttaacgaatcgctttttcatattctttgatgcgttgaaaatgcttatcttcatcatgtttaatttggtataaccgataaaggatgaaaacgcttaaaaatgtcccggcaatcaaaacagctaaaattaatccttttgacttgttttgattgattaaaaatggatataaatgagcgaaagatgaagaaaaacaacttggcaacagcaaaattacatttgcaatgagcaaagtcataaagcaaaactttgtgtatcttgcatgatttgtcgggctgctgtaaatctttacttgttccgcaacgctcaatatgacaacgatgatcaacgctaatggaagaaggtatagtggcgaatgactcatgaccaatgaaatcagccaatatacatttgtaaaaaagaatattgcggtaacatatctgacaagcaaataccggttatagtacatcgatttaagcatctggtttttttgatttttttcaaataatgctttttctacgtcattcataaaaatccctcatttattaaaaatctggctccccgctatttgtgataacttaagctatcatccattacctccaatccaaaagacttcttaacgggtatcttgctgatgaccaccttccttccgtctatttataaaatttggcattgcctgatgaatatattgtaaatagcgaagacccacattttaattacataaacaaatcaatcatttggcagctcttgcaggattaagttccctaatttttcaacacccattggaatcggaatataggcttgcggcggaatatttacaactggctttcctacacgttcaccggcttccttaagcttttgaaaatacatctttgtttgtgggctgactaaatataaatcaaagccccctttttcaatcatcttattgccttcatttgctgaaacggcatccacttcaatctccttgcctattgatttaaaaaattccgttgtcttcttcgccattaaagaagaggacatgcctgctgcacaaataattaatgcttttttcataataaatgcctccaattggtttttttgttatttaaacttgcttatcaataaatgaaagagttccattgcttttaatggcccgcttgtgccgccaatcatacatttttcaaacagcaagcttggcaatttgttagcactttcggcattcaagttcatttgtttttttataaagttcaatgatttcttttgccaggtcaatcactgtcatggcattcattaaatgatcctgtgcgtgtataagcaatatactgatttctaatttttccccgcttgcttccccctttataaggtttgtttgaaaacgatgagcgattgtcatggcttcattggcttcttcaattttttgctcagctaatgcaaactcgcctgctttcgcatggttgatggactccgcagctaagcttcgggcatttccgccatttaggataatttgaaagctgatttcttctatgttcaacgtcatcacccttaacttgaaaattgtgttttttatcctttttgttgcataatacaaagaattggtccttgctgttgaaacacaaatcgtaaatcaatctggatgtatccttaatcactgcttgatgcttctttttatcagctgcttaccttaactccatattaatatggaaacggtttcactttaacccaaactctttccttagcgcaacggaaatcattactggaaaaaataaagcaacggaaaaatggaatcaggatcatttttccgctttctccccattaacatgactgccgctatttcaataaaacatggcaccaagcttttaagtatacctttttgtttatcgcatttgccaatactgcggtaagcaaaaggctgtttgcagaggttttagattttaagaacctggcattaaaagtgcaattggaaagattttctgtaccgaatgctttcatttcccgattaacggctgtaagagcgggtaatgatatagtacaaacaccaaaaggagggaccgttatggaacatgcaaaggcgttagtggtgaaatttattatggtcgcagttgtgttgggcatcattttatccgccatcttcaacatgccgtttggcgatatgatcgccaccagtgtagtgctgaccattcttgcatatgtcctgggagatttgatgattttcaagcgggaaaatgaacgcgaggaagatacgcaaagaaatatcatggcgactgtcgcggactttgttctggcgtaccttgttgtgtggctgatgggacgatcactcgccccggacatggacaatctgttatgggcggcgctggcttcaagcatcgtaattgcagccggcgaatggttcttccataaatatttgcaccatcttttccatcacacgcctgaccgtgaatataccggatacggcggtgactgattgaaaaaacggcagctgatgagctgccgttttttcgtattcctataaaaacttaccattcatcaatcaatcatccaattgtgcaagcatcaagtttttcaatcgctgtgcacttcttcgggccaagcaaaacttttatttccctcaccttaccgtaaccattcttgttttgcttttgtttccggctctgtctttcgcaaaaatggaaagctttgtgccttttttctgtttgctgattctcacactgtatgcgcccctggcatttgctgtggctttgccgatctgtttgctgccgcggtatacatagacaactactgatttttccgctttacccgcaacatgtgtggacttcgttgtgacattgccggcagtcggcatgcccggtgccgttttgtcttttaccgttactttcactttgctgctttttaaaccggcctctgtgtagacatagaggactgttccggctttttgctttgaaaccggaactttaaaatatcctttcccgtctgccgttccgcgtgcaagtatttttccgttcttcataatggccacttcgatgcccgggtcagcgctgccggaaatggatgtgctattatcgccgacagtccatactttaggtgttttcggctgctgtgccttgccgccgatacttccggacagcagcgtgtacgtcacatcccgcccttttccggacggaacggagaagcggcttgccgaagacagctttttcacaaccgccccgccgccttttaatttcagtgaactgccgttgtaagttttaattcggagcggtttgaacgcggcactccctttaaatccgtataatccgtttgtctgctttaacacgagtgcggcccggaaatcggtcataaactgcccgaaagtcaggttcgggtcaatgtatttttggatcacatcctggatagctttttcatttgtattcggatcatccatgatttttttgaaaatggcatcgccttgtccgcattggattttcaaatactccataaacaaataggacaaggaataattggcaagcacatccccgctgtcatcccagtagagaagcgagtggccgtttgtaatggaagcatcattgttatagtcatcaatccggtcggaaagcggtttgccggtatagatttgctctgcggccatggacatcccttcgtcaatccatgtatcaaacgtatcccaatgatgctggatgaacactttctggttaaaagagatcatatgctgaaactcatgggcgagcgtcgaatacgcttcggttacatttttggatgtccccgtccccataagcgggtatgtgtcaatataaaagatttccgacttgttggaagtgtcggcatcaaaaaggtcaagcgggtaaaaatagccggctacatatccgcccgagccgtcaaacccgtcctggatgtcataacaaagaatattcactttcccattaccatcaacatcggacggcatgccgaaatatctcgtatcgagcgcataaatacggttgtcaaattcttttccaagctgtgcagcctgggcgccgttcagctggttgttgtatacccagacatccgcatgcggcccgctgtataaaagcttggcgcttacttggtaatctttattgctggcaagattggacacccagaattttttcgtatcacctacccggggagggcgggtttttttcatttccatgcggatggaatacttccgcaggcttaaatattttaatagatcaaatggcttctggtaatcaatccggtaaacactgcttttgaacttttggcggagcggtgccaggttcgcaatcttgaaagtgccggtcggctctgtcaaaaggctcgagacagactcgttgctgacaagcttataatagtcctgggccgacgcgcttccgcctgcgccgaataccccggccgggagtataaacaatagcgatagaataataggcaaagataatgcccgcctgaacattctcaatgaaattcctcctgtacctttgtccgggcaacccggcccttttgaaaagttgtttcttccattctagcacagccgtccgaatgttggctgaaaatgagagaggtttttttacaagttttacccaaatttgcctggctgcaatgtcgatgagtggattcttctgcagcaacaaaagtatgggactggcctgcacaacccttaccatttccactaaaaagcagcgggaagtttcatattcccgctgcattgtggagtttttcggcctccgctgcgaccccggcgctggctgtttcgatttcttttacaattttaacaagttctgccacatggttttggacgattaatgccgtttgtttgttttgtttgaccgaagcggtaatttgccggaacgattgtcctgccgctcctgcattgccatccctatttctatcttttcaacaaaagaatagtacccttttttctgttcagccgctatataaggagtgaaagggggtgagcgggaatggcacaagtcaatttaacaaattcccgcatttcattaatctttgataacggggtgaatgaaaatggaaaaccggtgaccaaagcgaagtcgtttgccaatgtggccgtgtcggcaacacccgatgccatccggcaatttgcagaggcatacgcttcgctgcagcaaaaagcgctggtccgtgtgacgcgcactgacttgaacgacatcagtgcgtgaaaataaaaaaagggggaatgggtagatgaaaactttggaacttcagtttttgacgcaggacaataaaacagtgagggttgcagtcgatgagccggcagaacccatcgatacggtgaaagtgaaaaacgccatggcccagatgctcggctcgggcgtgctggtcagttcatccggcatggcgctctccagcgtgaaaggcgcacgccttattgagcaaaacattacggaatatacgctggcgtaatcttttgcccccggttcccgttccggaacgggggctcttgattttacagggggagaggagaaatgcatgaaatggtgtcgctcatcagtgaagtcggatttccggtcgccgtcaccgtctttttgctgtaccggattgaggccaagcttgatgcggtgattgaatcgatccaaaacctgccggaacggatgaagggaatctgaaagggaggggcttatgtacaagcccctcccttttgccggatggatcattttccggtttgccgttgttcatattccacaaagcagcgcgagccacaatctccccgctttttcccgcatacctgccgcctgcatgctccatttccgcaaaatccacgctatagatggtacacttcgagcagaacgcgaacattcgtgagcagttcccccacatgaaaattgggacatgctgctattttccctccgattctgcattccccggcacacctgttttcaacattggaaaaacaaagaacagcccgatgatgaaaaacaacgcagcaagttcgaaaacagcagtgatcgaaaaccattccttcaatgcccccgcaaggctcatggtcaccaccatggaaccagtgaaaagcgggctcaaaatgccgttcaccctgccgataaaatcggattctgtattttgcaggatcagggtgttgatgccgatctggatgctcggcatgaaaaagcccgaaacgagttcggcggcaagcgtcagccagagcgcagtcgaagcaccgattaccgcaagcccgatggcatttgcaagcataccggtgaacagcattttttgcggtgaagcggattttgaaagggccatggaaaaagcgccgcctgtaatcatcccaatgccattcaccatcacaagccattgcaggttctctttcggcaggccgaggcggtccgttacgaggaaaatgttcattggctggataaaaccgacgccaagcccggccgccagaaaaccaagtcccaacagccgcaattcctttttagataatacatagcgaacaccgctcttcatttcctggaaaatattcgacaatttttccttcttttcaattgcctggtcttgcgggataaatgacaaactggcggcggaaaacagaaaagcgagaccggttatcaaaatagaataatctattccaaacctttcataggaaaacgtgccgaccaccgggccaaaaatcatgaaaacagcaaaaatggtctggtaaacggccattgcctgctggatcaggcgttcctccaaatgcattttaaacagtttcatcccggacggttgcgaaaactgcgataaaatcgaggaaatcagtgttgcaaaaaagacggactgccacgagccaaaaacaagcgcgccgatgacgccaaaaatggatacggcactcagcaaatcacaccaaaccattgttttcttcggctgccagcggtccgcaaatgtcccgccgataaaactaaaaatgaaaatgggcagaaactccgccactgaaatcatggaaacggcaaacgggttcccgtttgttttttctgtcacaaacaacaggacggcaaaattctgcacccaaatgcccacctgcaaaaacaacgcggatacaaacaccatccggacaaaccggtttctcaaaagctctctcacaagcgtccccctctggccaaatctgtctcatatcgtgccattatcataccggaatcggaagccttaagcaatacagattgatttccgggccgttgcataaacgaaaaattcccattaacaatttggaaaaaccatgatatgatagcgattagattagaaaaaaaatttgaagaaaagggtcgaaaaaatgaagaagaagatatttatcacactcgggattctcttagcgatcatcgtgatcggaggcggagggttcgcctattacgtctaccattcagtccaaaatgccgcagacaaaatgtatgacagcaaatccgtgaaaccatccgagaagaatacggaaaaaattaaaagcgaaaaacccatctccattcttttactcggtgtggatgaacgggccggagatgtaggaagatccgatacggtcattattcttaccctgaacccgcaaaaaaaagccatgcagatgatttccattccgcgtgatacgaggacagaaatcgtgggcaaggggacattgaataagataaatgcggcttacgcttatggcgggccaaaaatggcactggatacagtaaacaaatttgccgatttaaatcttgaccagtacatacgcataaacatggaaggactggctgaccttgttgacgctgttggcggtgtaaccgtccacaacaaaatcagctggcatgacgaaggatattataaaaaaggctattattacgccaaagggaacatcacattggataccggcaaaaaagcgcttggttatgtgagaatgcgccaccttgaccctcagggcgactttggccgcaaccagcgccagcgtgacgtcattatggccgtcattaacaaagcgtcgacaatccagtctttctcacgctatcaggaaatcctggctgcgatccagaacaacatcaaaacaaacctgacgcttgatgatatgaaaaacattgcgatgaactaccgcgactgccgccaaaatacgacagactatgaagtaaaaggctcaagcgcgaccattgatggcatctactacctcaatgtcagccaggcagaacgcgacaaagtccataacatggttaccaatatggaacaatgaggacaggccccattgcccggggcctgcccttttcaatttttatttttgtttttcttgcggttttaccggagatctttccggctctatgtctttgtgatgatgctgtttttcctgttgttccggtgagtcgccttttttgtccttgttgtaatccatttggtgcctcctcccggctagattgatgctcctcaagcaagcatcactgcctgtttgttgtaaaaatacccggcaggtgcacggaataaacaaaaaacattggcgcccgcaccagttggagagatacctgtcccttttacggggaacgtgtgctaaaaggcaaacaaccttacaagcttgcatcagccgccggtacctgccccgtccggagtgcttttacaaaagcggcccgtggaaaacggaaacgctcaaaacagcttgaacaaaacccatattacaaatgcccacaccggaatggacaatccaatgccaatcagacagcctttcgcaaaatctccgtctttgtcattcatttcttcatttcccttttttatcaagatgatcgaaattcgctttgttatcattttggcgtatatggtgaacattattataacaatccatttttcgaaaaccaagtaacgattgaccggaacatgcgtttgtttatataatggaaacaggtgatccgtatgccgcaaatcttaaccgaggaagaagaaaaactgatcgaggcatttatccttctgccgcttgccaaaaggacgctggaacgggaccagagagcgatccgggcaagcctgttaaaatttaaagagccttatctttttgcaacagaccaaatgcttttgcaaatttcatcctgcctcgcccaggttaaacgggaagccggcagaaaaaagatgcgcttttacaaacggaacgacctttcctataccgtgtttgtgcgcggctggcggtttgaaaagaattaccacccgcaaatagcagcggagtgggtaagaaaccgaatcaccggtttcttcctcccgttgcgccggccttttgaagaacagtaaagagcttgcgaaaaccaacagctttactggtattttaaggaacgccgcccggacgtaaagcgctccaaaacgcctgtccatgaagcatttcggaatacacgggagattggaatgccgggtgaaagggagacgcccccctctttttaaagaacgcgaaaaaattccaatatacgattgacaaacagccagtgtaatcccggagaacatggcagcctggaattttcacacgcccggaaatccctttagcggatcctccccgctaagcgcttgttttcttccactttttgaaactttcttccagacgggcaaacccttttttcatttcctcatcactgcagtaggcgaaacaaaggcggatttttgtgtttggcccgcgctcaagcgtaaaggcatcacccggcacaaatacggcgccgtcctgtgccgccattttcatccattccgccacaccgccttttttaacatcaatccagtaaaacagcccgccggcaggttcagccccttcccattgctccgtttcatgcatatgctgtaaaaaccgttttgtccagtctttccgtttttcataaaagtgtttttgttttgcaaggatctgtggccagtttccggaagaaatgagttttcccgccagcatctggtttatcggcgatgtgcaggcgtctgttacctgcttaaactgttcgagttttttcagaaataccgggtgtgcgagaataaagccggtccgcatcgcgggtgccatgacttttgaaaaactgtacaggtatatggttctttcttttaagggatcgagttcgaacaaggaaggagggcggctgtgaaacagcagatcacggtacggatcatcttctataatgataaaatggtactggtaagcgagttcaatgagttttttccgtttttcgagagaggtcgtgacgccggtcgggttttgggcattcggaataatataaagcgctttcaatcttcttgtttgcaatgttttttcaagaaaatcaacatccagaccatcttgttcaagcggaatgccggccgccttgagccggtactggtgcatcgccgaaaaggcaatggaatacgtgtacatttccattgcaaaactgtccccttcatccagcagcattctgcagacaaggtcaaccccctgcgtattgccgtttgtcgccatgacataagcttcaggaatattttcctttttggagatggcatccacatacggaccaaacccttttgcactacaatactcatacaggcgtgccggatccgcctcaaagatttcattcatgatgcgctgcagttcttttttcgggatcatgctgccatttggcatgccgacgctgaaaaataccggatcccggacagccggattgatactatccatatacacatcaatcgcattttctttaatcttgccgctcaacgctgaaaacatttgcttcatcgccgccgcaccccgctttccatttctgaaaaattgcctataccctatgtatatgggaaagcgcggaggaaagtgacataaaaaatgaaacgggaaaagaatacaagaccacccaggccggataccccagcagccaacaaatgccggaacaatagcggagaatgcttcccgctgttctgttttggcattaccctgtcatcgaaagcccgaagccgtacggatcggcgcaatacaaaagcctgtcccgcttgaaaaatatttcaaagcggaacaggctttaaatttcctctcattcccaggtttctcaaaggagccgtactgtcccaaagcacatactctgcggacgattgcgttcatgaaaacagattggttaacgcagaaaatcctgcaggctgctttccacaaactgcaaatggccgatcatggccttgcgcgctttttcgctgtccttttcttcgatggctaccctgattctttcatgttgttcgtacaaggcgcccattgtggaaggatcagaaaaaagaagcattctgcgcgtttctttcattgcatcctccatcgtctcggcgacctggttcatcaacccggtaagaatcggattttgtacagcccggacaatggcaagatgaaaggcaagatctgctttttcaccgagttcttcgtttcccgtcgcccgcttcatatctgcgagcgcctggcttatactttccagatcagcttcagtccgtttgacagcggccgcggctgctgctccggcttcgagaatcttccggacttcaagcaggtttgccacatcttcctggttcatcagtactgcctgcgaaatgggatacgaaatgccgcttgcatcaaagttgcggacaaatgtcccctcgccctgttttaattcaatatagccgagcgcccttagtgatgttagcgcttctcttatagccgatctccccactgaaaacttttccgccagaagcggcaccggatcgagcttatccccgggcttaagctccccgttttggatcatctctatcaattcatttgccacttgttcataaatttttgcaggtttaatttttttatacttcatgttttctcctcttatcccttttctatattttatgaataccagcaatccggaaaaatagcaaacaaaaatttaaaaaaagagttgttttttcttttcattatacttatactttttaacatgtaagccttatcatctgatgactatttcatctaatgaccttaaaaattgcaattgggatggattggagaaaatttttcaaaaaggagtgtagattgttggagtacgtacaaaattttattccgcttaaggggcatttgtttttatccgcactgattgctgcctttccgattctgtttttcttctgggcactcgccataaaaaaaatggcggcacattttgcaagccttgccacactggtgattgcgctgctgatttctgtattcgtttacagaatgccggccgtactgccggttatgtcggccagccaggggattgtgtatgggattctgccgattgcctggatcattatcaattctgtgttcttatataaattgacggtcaaaaccggccagtttgatgtgatccgcaactcagtcgtatcgatcacggaagacagaagattgcaagctttattgattgcgttttcattcggcgcttttttggaaggctgtgccgggtttggcgcaccggttgcgattaccgctgcgctgcttgtcggtctcggattcaacccgctttatgcagccggcatctgcttattggccaacactgcaccggtagcatttggcgcaatcggatcccctgtcattgcgatggcagggccgaccggcgtttctgcgctggaaatttcaaaaatgatcggacggcaattgccgcttatttccatgttcatcccgctatatctcatcattgtcatggcaggctttaaaaaagcaatggaagtgctgccggcgcttattgtatcaggcttgtcctttgccttgacacagttcttcgcttccaatttcctggggccggaactgccggacgttttatcggcactcgtatctttggttgtccttgccgtcttcctgaaattttggaagccgaaaaacattttctattttgagcatgaagaggctgctgccgcgctcgaaacgccgcatgtttccaatacaggcgggcaaattgcaaaagcatggtcgccgtttattgtcctgacggttttgatcaccatctggggcatcccgcagatcaaacttgcgctcaccgggcagtatgccggggcgaacccggtattaaaggctctaaacccgatcggcggggcggcttcgttcagcgggaatgtgccatttttaaacaatcatattatcaacggcgcacacaccccgatcgcggccatgtataagctggatctgcttggcactgcaggcacagcgatttttatcgcagccattgtcacgaagtttcttttaaaaatttcatggaaagcatggtttgccgcattctttgaaacgttaaaagaattgaagtttccgattcttaccatcttgttcattgtcggctttgcgtatgtcatgaacgcttccggcatgattacaacattggcattggcgctcgccaaaacagccgcattgtttccgtttttctcaccggtactcggctggctcggcgttttcattaccggctcggacacttcatccaatgttttgttcggcacgctccagcaagtttcggcccagtcggtcggcatgaatccgctgcttgccattgcggccaattcatccgggggtgtcacgggaaaaatgatttccccgcagtcgattgccgttgcctgcgctgcaaccgggctgatcggcagggaagcacaactgctgagattcacagtcaagcacagtatgtttttgcttttcatcatttgcctgctcaccttcctgcaatccaacatcctttcctggatggtgccttaatcaggaaccccgctgcggacatttcgcggcggggtgttttgtcttcggtcacaggattcctgcaagcaattgaaggcgcttcccaaatggcagatagccagattttgtgttcgattgcaggattccaggcagccagtgggattatgactcggtggaaaacccgtggcgggacgttttgatgaagctctgtagcgaacgggcggttttgcacgcgtatgacggccgatgtttagaaactttttcgcgcgggtattcaaatgacaacacgaaacgaaaggagcatggccgatgccacatacaggtgaaacaccgggaaaaggcgagtataaatgcaaaaactgcggggaacagattacgctcgatgaagataaggacaggctccctccatgcccgaactgccacgaaacagagtatacggaagcgtgagaaaaacgtcatcctattggatggtgtttttctttattcatatataagtgaaattggaaatttacatctttacgcacagtcggttcatgttcgtttcccttcttttcttagtccatccgcatacgttattatcatgccgccctcccatttcaaagccatcagcccttattccttttccagcttctcctttatttcaaggatctttttttcagaaaagccagttgcctttttggtaaaatctagtggcatcccaagtttaatgagatttcgggtgatctcgattttcccttcttgtcttccttctcgtttaccttcttgtagtccttcttttctcccttcttctcttgcttcttgttttagttcatcttcatacgtgatcatcgtgccgccctcctatttcaaagccatcagaccttatttcttttccagcttctcttttatttcaaggacctttttttcagaaaagcctgttgcctttttgataaaatcaagggatgccccaagtttaatgaggtttcgggtgatttctatttttccttcttctcttccttcttttcttgcttcttgttttagttcatcttcatacgtgatcatcgtgccgccctcccaatttttgatttcctggttaaatttatttttccactattttctatcaaccagcttctcgtttcaatattttttcaaaaattaggtcttttaggctaacttggttacttatttccctttcttcacttactaaaaccaggatattcagatggtggcggccatccatcatcttccccatgagacaccaataagaggatatgaaaggcggacaaaagaagagaatacttggtggcaaatttttgcataaagggctttttggtggactatcggaaaactttattcataaaaaaatccggacatcaaaaagtgcccggaattttttatgattttagtcaaaaataatatggtttactgttttgcggtcgagacgtttgatcacttctgttattagtttaacagtattttcgtaatcatcacggtgcaagataccggcgtgcgagtggatatagcgtgttgcaatcgtgatggcaagagatggaatgccgctgcctgttaagtgaatggagccggcgtctgttccgccgcccggaatcgattcaaactgatacgggatatttaactcttcagcaactttcacaaccgtatcgcgcaagcctttatgcgccaccattgaagcgtcgtaaatcacgatttgcggacctttgcccattttgctaagcgcttctttttcggagattcccggtgtgtccccggcaatcccgacatcaagtgcaaaggcaatatccggtttcactttgctggctgccgttttcgcaccgcgcaagcccacttcttcctggacatttgttacgccgtaaacgatgtttggatggttttctttatgcagattttttagcacatcaatgacaactgcacagccgatccggttatcccaggctttggcaagcagcattttttcatttttcataaccgtaaattcaaagtaaggtaccaccatgtcgcccggttttacgccccattcaagcgcttcttcccggcttgtggcaccaatatcaatgaacatatccttgatttcgtacgattttttgcgtgcatccggtgataaaatatgtggtggctttgatccgatcacacctgtcacatcacctttatctgttacaaccgtaacgcgttgggcaagcatcacctgtgaccaccagccgccgatcgtttggaagcgcagaaagcctgactcatcaatttgcgtcaccatgaacccaacttcatccatatggccggcgatcataatcttcggaccgtccgcctgccccgttttcttcgcaattaagctgccgaggccgtctgtgtcgagttcatcggcatagggctctatatattttttgacaacggcacgcacttctgcttcattgccggcaatcccttttgcatcggttaaatctttcaacatggacaatgtctcatctaactttgccactggcattccctcctcgtcccaatatgtacaaagcctattataatcaaaatcgcaaaaagtgtaaaaagtttcagccatctacttttatatcacgtcggactatgccgggtatttcccgatactctttttgtgggcttttggctaccgcgtttctgagaaaagtcacgacacagtccattagtggaattgaaagtgacagccgtatgggcatttatggtcatcaagcagccgcatcgcattgggctttaccattttggccatgtgacatacactttctttaaaaaatcactttccaattgtgatccaccgttgcccgaatcactttccgttctaaaatgtagttggcgatcagttcggccgcgtcgatttgcacatcttttacaacaggcttacccttgaacatcaaataatcaccgccaccgccggcccggtagttattcatcacgacatcatattcggcggccggatcaacgggctttcctttgtatttgagtttaacaacccgtttgccgactggttttgacagatcgatcacatagtcgatgccctcccacatatcataattataatgctgtggttttgggttcgaaaaagcggggttgacttcgattgtcccgccgttactagtcttaaaatagctagccgaacgctcaagtgccgcttttatatctgctccggtaattcggataaccttaaaggtattcggataaatgtagttggaaacaacatcccgcattgtcacgttttcaggaaagcctggcgactggttatcaaatagtgctgtgcatgatatgtctgccccggtcgcttccatttgcacgcgattcataaattcaatcaggggatgatctttcaagcggacttccatcgggttatgcacgagcatatccccttcaattttaccgattggctggtcaagccaggcctgtgtcgcctcttcatatggtttggcaagagaaataatcgcagggtcggcttttactgtttcaacaaacaaaagttctgatgtcttctgaacacagcgccagtgtccctgttgtttttccaattgcaatacaacttttcctaccgccctgccgttattgcctggctgtaccaccgtcaccccgttgattgcttttccagcgatcatccggtgctgatgaccggtcaaaagcacatcgattccggatactttctggcacagctggtaaccctgattttcacctgtcaagtcttctgtcggttcgccgctgtccaaatcccgttcaaatccgccgtggtaagagaggatgacgatatctgcctgttctttttcgcgcaaaaatttcacccactgttttgccgtttcaacagggtcagcaaacaacatcccgctgatatgctgcggctgctcccagtttgggatataaggagtagtcaatcccagtacggccactttcaatccttccgcgaatttttttatgatataggggcgcccaaaataaggcattttcgtctgctcgtttaaaatattggcggacagccacgggaaatgggattccttcaccgcccccaggagcagcgcttgcccataattaaactcatgatttcccggcacggctgcatcgtactgcaatgcattggcagcaagcaccatcgggttaggcccttctgaatcaatccttgcataatagtaggttagcggcgtcccttgaataaggtctccattatcaagaagcagcacgtgcttttgccgtgcgcgttctgttttgaccaaagtggagatttttgccaacccaacagccgcttcctcatttgttccataattgatcggcagaatatttccatgaatatcgcttgtttcaagtatcaccagctcaaatgttttcatccctatttcctttcttttcgacatctcattatccacattgtagcttttttcttttacattttccatgtctgttcaaaaatccccattttttctacgttgttaaaacatttataaacaattaaaatttcgtttattttgttttccatgtagtatataatagaaactggaagtgaaggtgaatccatcatgataaaattgggggtaaatgtatgctgaaaaagtttcttgcactgtttgtcgttttaggactgacttcctccttggctgccggttgcgggagtagcggggaaaaatcagggaatagcagccactccagcagcagttcctatacacctaaagaactgaaaatcggctttgtgccttcccagaatgccgaaacattggaagcgaaagctaaaccgctggggaaactattgtcaaaagaactcggcattccggtcaccgtaacagtgacaacggattacaacagtattgtggaagcattgggttcgaagcagctggatatcggattcctgccgccaacggattatgtgcttgcccataaaaaacactatgcagatgtcttattacaggcgctccgctacggggtggatccgaaaaccggaaaacccacttgtattttgcaatagaaaannnnnnnnnnnnnnnnnnnnnnnnnnnnnnnnnnnnnnnnnnnnnnnnnnnnnnnnnnnnnnnnnnnnnnnnnnnnnnnnnnnnnnnnnnnnnnnnnnnnttattttgccatacacaccacttcggaaaaagtggattactattattccggcatgcttgttaaaaatgattctaacattaaaagcatcaaagatttaaaaggtaaaaagattggctggcagtcaccaacatcttctgcggggtatgtatggccggccgttgaaatgaaaaaagccggtgtcgatgcgcaaaaagatgtaaccggcgtccaactgcagggccatgacaaaggcgtgcaggcgctgatgtcgggtgacgttgatgctgctgccgtctttgtcgatgcccgtaatattgttgaaaaagagtacccgaatatttataaaacaacgcattacttattcttgacggagaaaattccaaatgacacgattagtgtacggccggatatgtctaaaaagtggaaagacaaggtcactgacgcttttatcaaaattggaaatgatccaaaaggtcaaaaaatcatcaaagatatttacacacatgtcggctataaaaaatcatccgatgcgaacttcgatactgttcgagaatacagcgaaaaagtccagaaaatcggaaaataagcacgaaaacgcatgaaaaggctgcctgcagggcgttaataaagcactgcaggcagccttttcttttatctattatcctaattgaacagtccatgtttatcgaaaaaaccgcttgttatatcaaacgcttgcggatcgatccggaaatatagtcgattatcgtaaccattataataataccccaaagaataattccaacccggtcccatgagtggccgtttaaagcaaaaatcagcggtgcaccgattccgccggcaccgacaattcccaaaattgccgccgaccgtacgctaatttcaaaccggtacagcgtgtatgacataaaagctggcatgacttccggcagaattgcaaaccacagcacctggatccggtttgcacccgatgcgatcagcgcctctctggcagaaaaattcatattttcaatcgactctccgaacagttttccaagcatcccgatcgaatggaaaccaagtgccagtatcccggcaaaagcgccaagcccgaccgatttaataaacaaaagtgccataatcagctccggaaatacgcgaatactgcttaaaaccacttttccaagcgtggaaacgacataatacttgctcatattccgcgctgcccaaaacgcaaacggcacgcatagaactgccgagataaatgtccctaaaaccgcgattgctaatgtttcaaggagagcatgcaacaaatcttccccgtccggatcataaatatagccgaaatcggggtggatgaacccatgaatgatcgcttttaatgcctgtgccgccgtatcttttaattcaagatggggtgcactgccgaatgcccatgcatagatcagaacgacaatcagcacaaccgcccatgttttgatcctcttcagcagcggtttttttaccaaatccgattgacccctcatattaatttctcccttatccgattacttaagccatcaatgatcagaacgacaacaaacgtgtataaaatgatcgtgagcacttggttatattggaaaaaaccgagggcattatttaaatacagtccgattccgccagcgccgacataccccagaacagctgccgcacgaacattaatttcaaaactataaaggaaatacgacatatagcttgccgtcacttgcggcactactccgaaaaagatccactggattttattggcgcccaccgctgtcatggattcaagcggcccactgtcaatcgcttcaatcgattcatagaaaagcttggcgatgaccccgaatgaaaaaaccgccaacgcaaatattcctggtatttcaccgatcccgaaaaccggtacgaacaatgcggcaagcagcagctcaggcagcgtccggatcaagttcatcatgacgcgggcaatttggtagatgaccggtattttcacaacattgcttgatgcaagcagggcaacaggaatcgctgcgatgccgccaaaggttgtccccaaaatcgccatgcggatcgtagcaagcatcggcttggtgacggaactgaagtaatgccagtcaggggggaacatttcattcaataacgaccccatgtttctgcggcctgcccacaatgctgccaaagagacttgtgtagtatgcgcgctcccccaaatgataagtatcaggaaaaggatggtcaggcttgtctttatccttgccactcttttccgcctgattacatccattacaacgcaccccctaatagctcatcatccttcagattacggccgtaaatatcagcgaaaacatcatctgtcgcttcagatacggggccgtcaaacacgatgttcccggcacggatgccaataattcttgtcgcgtaggccttcgccaaatcaacgaagtgaagatttacgaccgttgtaatccccagctcctggttaatccgtttgaggtcattcattacctgctttgtggtgagcggatcgagcgacgctaccggttcatctgctagaatgatttttgccccctgtgcgagcgcccgcgcaatcgaaacgcgctgctgctgcccaccagataattcatctgcacgcgaatacgctttttcttttatatttacacgttccaacgcatccatggcaagatccatatcttttttcgggaacagacccaagattgttcggagggttgaatggtaggcaacacggccggataacacattacgcagtaccgtagaacgtttcactaagttaaagttttggaaaatcatcccgatattacggcggatataacgaagttcctttcccttggcagcggtaatcgacttgccatcaatcagaatttcaccttccgtgatttcatgcagtcggttaattgagcgcagtaatgtagactttcccgcgccggaaagaccgacaattacgacaaactcacccttatgtatcgtcaggttcacattgtttaaccctcgtgtcccattcggataaactttagaaacgctcttaaactcgatcatttctactcccctttaatattgaaagttgtcaaaatttaatgtgctatttttactataccaatgaatgcccgcaaactcaaggatgattttgttccgtatatctcacgtttttctcggcactataccgggtatttcccgacgctcttcttgtacgtttttggctaatcatcagatggctcgtgatatgcctgcagaaaaaatcacggagtacctcttcattgcagcacggggcgtcacgtatgattggtgcttgcatgatgggggttatgatttggaaaaggcaatgagagcgtatatgggaagattgttaaaggtatttttgcaatagacaaaatggttcaaattcattataataaagaaaaatgaatgatcattcattttaaagggggccttacccatggcatatacgaaattcgggccgcttaccgtcattccgggggaaaacggcagccgcgtcccgttcagtacctcgcttctcgtcgagggcgggcagggggcggcgctggttgactgcggcagcggctttcaaattttaaatgaaataaaaaaggaatacgccattcggtctgtttatttgacccattaccatctggaccatatttggggcgcgtacctgtttaaagacgccgaaattcaaatcaatccatatgatgtaaaaaaactgaatgatgttgaagagctggcaaaagcgagcggtatgctgagcccggccgacccggagagccgcaaaaagtggatgaagcagctgtttgagaaaccgcctgaaaactggaatcgcccgcactggcagccggtgctgaaccttacggaaaaatggtatccgtacggggaagagctcaatgtatatgggacgaaaatgttgatgatccatgcgcccggccatacggaaggatactgctgcccgtattttccggaacacggtgtcctgtttgccggcgattttgacctggcctctttcggaccgtggtacaacaacgccgactctgacattgacgcctttatcgcatccgcaaaaaccacgttggaaacagatgcgcaaattttcatcacttcccaccataaaggggtggtggacagaaaaacatatgaagaattgctgaagcggtatatcaacaaaatttacgagcgcgaagaaaaaacgcggtctgctgtaaagcggggtgtggcgccggacgaaatgatctacgaagaaattttttatttccggaaaaatctagaacagaacccgcaacttgtgatttccgaaattgtcggcatcgccaagcacctcgacaggcttgtgcgtaatggggaaccgtttgaagcttattttgaggcatttttgcagcactttcagttaacaagggaaaatattttctatcacacatcttctgtcccggcacaactccaataacaggtagcggcgcccgcttcgccgctatttttcctgtaaaagcctttttctatgccggacacagcgcttgcacaaaaaaacaaccgccattacggttgcaaatcggcagcttgtttcctcagctgcgtttttaaaattttcccgaccgtttaagcccttctttcatgcaataaaaaaagcacccacccggatgcttatttcagtaatgcctttgtataagtaagatgatttgtaaaaacgccatcagctccatcttctatgactcttttttgttctgctttttcttttttagaatcaaagaagaatacatatactttcaaatggttttggtgcattttttggattaattttttgtcagccagttttgcatctaagccaatgccaacagcgtacttcctccattctcttattttctgatcagtgaagtcttttttgtttttaaaaagcgttagttgcacgagaggaactgatctatccaatttatggattttctcaaggcttcttgccgaaaaagattcaatcattaccttctttttcttaattaggccttttttattcagaagcctgatcaatggctcctccatttttaattcattgccgactcgtctggtttcaataaaataatttgttttcgatccatactgattgatgagttcttcaagggtaagaatacgttggcccttgtattttttaccgaaccagcttcccgcatccaactttttgatttgcttcaaactgtaacgtgttacatcccctttcccatttgtagttctgtccaaagttggatcatgcatcagtatgagtttgttgtcttttgtttcccttaaatccaactcaatataatcagctttttcattgacggcaagcctaaatgcgggcattgtttcttcaggtgcccggtcatctgctcctctgtgagcaataataagtgtttcctttttttcttttttcgcaaccgcggaagagcagcccatcaggttaaaaacaaaaatgcagactatggaaataaaaaatattcttttcatactattaatttatcataagatgggcagaaatgtgtttttaatttgtctcttgttctgctgtattatctgccgtcatgtcgttcaccatggcggatagattttccgccgttttctgtgacaatagtttttcaaatttttccatatcgaatccggtactggtcaactcatcacgtgtcagggtatacgtgccagatgtcgaaaaatacgccgaatcaatttgagatgtcaccgttactggaaccgttgcaccggtaatatttccgtcattgtcctttgcaaggttaatatttgtaaattggattttagcgctcatttttcatccactcctttttcatcattttcgtcttcctcgtcatctactccaagctggtcacatagataatcatagatttccgattgctgtccctcatattcggtatcctcaaatttttttaacaccgccttaattgtccttaacatttcacgattatcaccaccttcaataaccattttttcagaatacaattcttgcaaatcttcgttaaatgccttcatatctttcacgtcgtaggtatcgtcgtggatgatgggttctccgttttcatctttttttgagtgctcttttaatagctcaatgcggtcttgatcgaccaatatagcgcgctcctgtaacatatcaataaaccgacgacggaaacgcgattgtttccgtaccagtttcagcccgtacataaagttggcaatttgtgttaattttccattttccaattatactttcacttgtcatgcccctttttaaggatgattgcgctttcatttcaccgtttttcaatacaatatatgcatcgtctaaacggatatacttggaaaataggacagggctgtaccggaaatgcccggcacagccctgtttttgcgcaggtttcgtatgaaactgcctgcctcttcagccatatttttttaaaaaaactgcacctatcacctgccttctttcaggtgataggtgcaaggcaataaaacactattttttcacatagaacagccttgacacaagcaacccgactgtcccgagcgcaataaacaaaatcgtccggatgaaaaggttgacggtatgcatatcgacaaaaatcagtttacaaagcgtgatcaaaagcaggatcatccccgcgagccggatcttcttattgtctttccaaaccccgagcgccactccagctgcagcatataccatccagacaaaagactggagcatcatccgcaggctgacggaccagctttctgcaaccgcacctgccagctgggtaagaaaaacaagatgaaaaaaggcatttacggcgatcataaagtttttcagaccttcctgtttcaacgaagctgcagccagcatccgatagaaaaacagcatcgtcccgatcacaacaagccacacgaaagtctccgcactgaacacatcccggatccatgcggtggaaaataattgaaaagttgtaaaaatataatgcaataacccgataacctgctgaatgactgctttaaaatgaaagccaagataaatggcgaccgtggctacaataaaatacacggcaagatttagcacatggtaaggcaaaatctggtataggaaataaacaacgcttactgtacaaatggaaatggagacagagatctgctcccggttttgtttttcccggccgtagtaggcaaaccagccgtaagcgactgcagcggccaataagtatagattaaacagcgcatgttgaagcgatgcttgcagcaatatgcccggcacttcctccagcgtactataagcccatccggttgtcagcacaaagcttgagaataagaccggcaccgttgcctctcctattcccttcttgtaaaaagcgacccagcaaagcaacgcatgctgaatgatcgccccaagcacaacagaatacgagatccctgcaccaacttgattgatcaaaagattgatataaaggataaaaacggcggcatgccacagcccacttgccgtataaaacagcgctttgtaagatttccggacggcaaacaagagcaaaagcgcataaaatgccgtttcataccaaataacaaaatgggcggcatgttcctttccttcaaccaaaaacggcacaagatacccggcacatgcagttaaaatcgcaatggcttccgaacggtgccggtcagaaagaaacagcccaagcccgatccagatcaggttcaggataaatgcaatgaaaggcggcacgaagccgtacaaaacatgcatcgcaaacgtcgtcaaaatggcaacggaaacggcgccggacagcagcacggttccaagtgcctccatttgtttcttaatctgcctttccccaaaaaagtacagcacagcggccacgccaaaaccgagcaaaatccggattagttccgtgcccgcaatggccacaatggtaaatgcaaaaataaggcccagaagcagcacgaaaataaagattctcggcagccacaccctcccaaggcggtattcccaatcaaccggttccggtttcgcctgaaccggcgttttctgcaccggtatttcagcattttgcaccggtgtttcagcattttgggggcgcggtgctgttttttcaacccgtttatccggcgtgccggtggcggatggcacggtactttgactggcttccattttggccggtcggtttccttgtttcgctgcaaggccagtttttaatgttgccacctcctgttccaaaacggccactctttgttcaagctgttcaatccggtccatttggttccccctcaatttctcttcttctataaagatattcgaagcaggcagtctgatttcctttctcattttgtcttttttcgacaggttgaggcggattttgccggttgactcgcaaccagcaagcgtgccgttttccaaatcgggattaccccgctgcaagttcctttttaatggcaataaccccctcggttttgttccggattgtctggattgcgatttctatacttgcactttcctttcaaaactcatttgccaaatctgcaagccgccttccgcggttcttgtaatttgtaaaattgctttttacatcgataaaaagcgcattcggcgaaaacgggcctttcttaaggtagtgcagatggaaagcttcggtgatgatttcaagcgaaacatcgttttccagcttccggaatgccgggaccggaaactgccggttcagcacggtttgtgtcgccctgtcttcaaatacgccgttttccgcgtattccaagcggatcagcttcggtgtcagcacggtaaaccggtaatgctctcctgttataacagcctgcgggcttaatggaaaacgcattttttcttcattcatcacggaccacccttttttcattttactattcgctcatgcaaccttttccctttttcctccaaacagcaactcttttcccattaaaaatcatgctgattcggcaaaaaaattttacaaatggcacttttcaaaaggaaatcggcaagaaaagaagaaattattctttgcatgcttaaaaacgatttaaatagaacggctaccggtattccggcagccttcgtttcaaaaaggggaatgagaaatggcaaaaccgctttacgcggagcagcgaaaccgtgccgttttcatctgcaacaaaccggaaacggcacggcccggagttggaagacggcatttgatgaaaaaggcaggaaatttaaaatcttctcttgaaatttcaaatgattaatcctataatgaattcaaagttcattccaaaaacgaggaaaaggaaaagtacggtccacgaattttcacagagagcttcggttgctgaaaagaagcaaaaggacggatcggaaaaatggccttggagttccgtgctgaaagcttagctgcaagtaggttccggcgggaagagcgcccgttaaagcgccgcagtataaggagattgcaggctcccgtactggctaaggctgtttatgtgagtaaacagtgaatgaaggtggtaccgcgtgaattcaaaccacgcccttatcgtgtaggggcgtggttttttatttttcaaaattcaaggaggaactgacatgacaaaaccattggtacttcaaacagatttcggattatgcgacggcgccgtagccgcgatgaacggggtggcaatctcggttgacccggcgctccgaatctttaacctgacccatgaaattccgccatatcatatttgggaagcttcttaccggctgtaccagaccatttcctactggcctgcggataccgtgtttgtgagcgtggtcgaccccggtgtcggatccgaccggcgcagtattgccgccaaaacggcaaacggccagtacatcatcacaccggataacggcaccctgacccacattaaagacaccattgtggccgccagagaaattgatgaaaccgccaaccggctcccgcattcagaagaatcgtatacgtttcacggccgggatgtgtacgcctacaccggcgcgaaactggctgccggggtgatccgttttgaagaaatcgggccggaaatcccggctggctccattattgaactgccgagaaaagcaccggagcttcaggatggcgtgattacaggcacgatcgacacgctggatgtccgcttcggcaatttatggaccaatatcgattcttccttgttcagacaattggacgtcaactacggcgattcgttcgaagtcacgatttttaacgaatcccgccagcactacaaaaacattatgacattcggccattcttttgccgacagccatattggcgaaccgcttttatacatcaattccctgtacaaactcggcatcgccatcaaccagggctctttcgcaaaagcctaccatatcgataccggcatcaaatggaacattaccatccggaaagcgccgaaaattgtctatcaaaaatagggggaatcacgacatgcaatcaaacagaagatcgatcgtcacaattgttgcaattgggattggcgctgccattttcattattttgggcaggtttgtttccatcccgaccggcatcccgaatacaaccattgaaacgtcttatgcttttcttgcccttatgtcgattgtatacggcccggttgcaggcgccctgatcggcctgatcgggcacgcgttgaaggatgccatttcctacggatctatctggtggagctgggtgatcgtttccacccttgtcggcttcttattcggccttgtttcgaaaaaaatagacatcgattccggcattctaaacggcaaaaagatttttctgtttaatatcgtacaggtcattgcccaggcaatcggatggtttcttgttgcccctttgctcgacatcctcatctacgcggaacctgccaacaaagtatttttgcaaggcattgtcgcgggcgtgtccaacatggtgactgtcggcatcatcggaacattgctgattggtgcttacgcgaaaacgagaagcaaaagcggcagtctccgaaaagaataagagaacaacgggaggaaaagatgaaaaagcctgtcattgaattccggaattatacgtttcaatacagaagccaggccacccctaccctgcatgatatcaatttgacaatttatgaaggggaaagtgtgctgattctcggacagtccgggtcggggaaaagcacactcggtcattgcatcaacggcctcattcctttttcctacaaaggtgaggtgtctggtagtttaaagataaacggaaaagaaacaaaagatatggatattttctccatatccaaatcagtcgggacggtgctgcaggatccggacgggcagttcatcggcttaaccgtcggcgaggatatcgcttttgctctggaaaatgaaggccttccgctccgtgacatgcatgatgctgttgatgaagcagcacggacagtcggcattagaaacaaacttgccgcacgtgtccatgaattatcaggcggccaaaagcaaaaagtgtctcttgccggtgtaatggtgaacaatacagggattcttttgtttgacgaaccgcttgcaaatctcgacccggcaaccggaaagcaagccatggagcttatttcggacatccggaaaaaaacaaatgtgaccgtcttgatcattgaacaccggcttgaggatgtgctggctgaaaaaatagaccgggtcattgtcatagatgacggcaaaatcatcagcgactgcacgccggatgaactgctttcttcttccgtgctggaaacgtgccatgtccgggagccgctttatgtcaaagctgcaaaatatgccggctgccgcatcacaccggagatgcagccggcacacctggatacttttcaactcggccggtgcagagatgcccttttaaactggtataaacatgctgctaaaaagccggttgcccgcattgaaacagaaccggtgcttgaaatccgtcagttgtctttttcgtataaacccgggcagcctgtgctcaaaaacctttcttttaccatccaaaaaggggaaatggtaagcattgttggaaaaaatggcgcaggaaaatcaacgttgtcacgtctgatctgcggctttgaacaaccttcttccggaaaaattttttacaaagagaaagacattacaaacgacaccattaaagaacggtcgcttcggattggcatggtcatgcaaaatccaaaccagatgatctcaaaacatatgattttcgatgaaattgcgctcggcctggccaaccgtgggattgcaccggaagagatcaaaagccgtacagaaaatgccatgcggctttgcggactttactctttccggaattggccggtatccgcgcttagtttcggccagaaaaaacgggtaacgattgcttctattctcgtgctggagccggacattctgattctcgatgagccgactgccggccaggattatatgcattaccatgaaatcatggagtttttggcggaattgaataaaaaaggtatcacgattctcttcatcacccatgacatgcacctcatgctggagtatacgccgcgcgccattgtgcttgcagacggagaaaaaattgccgacggtccggctgccggaattttaggccattctgatatgatccggcgcgccaacttaaaagagacatccctctatacgcttgcaagccggctgcatctgaacccggagcgtttcacggaacgctttatcacgtacgaaagggggctatagccaaatggcaaccgaaatgctgtcttatattgagcggaaatcccccgtccatgaactggccggcgcgacaaagctgatctgctttttgacgtggtcttttgcggctatgcttacttacgatacgcgtgtgctcctttttctttttcttttgagccttgttatttttaaaatttcacgcatcaagatccgggaaatattatttattttgctttttatccttgcttttctgcttttgaacaacattgcgatttatatcttttcgccgcaacagggcgtgagaatttacgggacaagccatgtgctgttctcgattgccggtcggtacaatatcacgtgggaacagcttttttaccagtttaacgtcacactcaaatatttcacggtcattccagccgcacttctgtttatcgtaacaacaaatccaagcgagtttgccgcatcgctcaataaaatcgggatcagctaccggatttcatttgcggttgccctggcgctccgctatattcccgatattcagcgggactttcataatatcgccctttcccagcaggcaaggggcttagatatgtcacgcaaagaaaaactgccgaaacggataaaaaatgccgcctccatcctgattccgctcatcttgtcgagcctcgaaaaaattgaaaccatcagcaatgccatggaactgcgcggctttggaaaaaataaaaaacgcacctggtacagtgcgcgcccttttcagttaaaagactatgcaacaatggccgcctttttggttatcctggttgtttcactgctgatcacctttcacaatgacagccgcttttataacccgtttcttgggcttgcttcggcggtttatcttgatgaaggtttgtaaaaagagatttggattttctttccattaaaaattttcaggaacaggttgtttttcgtacggaagtttatagaatgatgcaaaatttaagaaaaatggggagcgacagcaaatgggcgttagcccgggaagctctgtagatatccattttgatacgcggggctcggtaaatggtctttatccggttcattcaccaagtcctgcatctagtttgccataaagcagaaacaggcggagcacaagcttttgctgctttttctatcaaatctttgcattttacgttttaatgacccaaagcggccctatttttaatgaagggcttcccattttatgagaagccctccgtctcaaagtgcagtgtctgtcttttgaactccttcttttttatatgcgataaagtagagcatgctgacaaacacaactgcgcctgccgcatttccgaggaaaaccgcgatgatatttttcaaaaataacatccatgaaagatgccccgcaaaaatagcggccggaataatgaacatattggcaacgacgtgctggaacccgatcagcacaaaagccatgatcggaaaccagatgccgaggattttgcctgcaaacgttttggcgccgtagcaaagccagaccgccatgctgacaagccagttacaaccgatcccggagacaaatgcctgccaaaaaggcgcgctcgtcttcatttctgccgtgtggacggttttcgccaaaaaatccccttctgtcaagccgataaaatgcccgaaaaagtaggcaacaaatagcgcaccaatcaggttaaaaatggtgatccacaaccagttccaaataagctgcaggatgttaatctttttgtcaaagcaggccatgctgacggccatcatattgccggtgacaagctcgccgccgccaaccaaaatcaagatcaggccggtcgggaacactgcggcacccataaatgtgtcaaaactgccccagctccccggcatcatgccggtcacccggatatacgccaaataaccgatagcaataaaagccccgcccaaaaagccaagcaccaccattgacaaaaacgagctgttcgctttcgctattcctttttcaatcgctacgtccgcaatttctttcggacttaagtccatcttacccacctctcgtttcttacaggatagagaatacagacattcctgctgcctctcacccgcaccaggatcagcgcaaattttcaaaatagatcattctaaatgaggctttatttaagtgccagcgtgtttcttcccgctccagccgtattttttctcgggcgggtattatatcttttagggtgtataagcaaaatttttttataccgttttctttgcatgatattttttgaaacttccacgatggaaaaatttctaatttataatatatataaactttccatgaagtcgaatgcactttggcgtttctggacatttggcaaaatacctttccccgcttcggcgcatgcttaaacagacaagcagggaattttatatttctttttaaaaagattcagtcattatggatatttaaagctgcgccctaaggaagccattcatcttatggcggaagccgcgcgtatttttgtctaaatcataaaagctattcccacactgattgcatggcagacagttttttcattctttcaaccgggaataaaaatgtcgaaagaaaatgggtatgaacccgtgttgtccgttcatactcatgattagaaggctgtacagattcgaactatacagccaagcgcatcattggctgccttgaggctcggactccaggcagctttctttttcattaacgcatgcactgattaaagtcttctttttttaaagtgatatactcatcacaaagatccttcatataacctgctttttgttggtcgactacgccggcaacaacatttttccccaaacttctggccattttaatggctgcttcgtaatccgtatcggcactgaataatattgcctcatcataaccgttatgaaaagcaagtgagaccagatctaccgctatatttacatctgttcctttttctgtaaaaatgggattgcccgacgcgtccgttccgacaacacttaaatagcccagtttcgctatacattttggaatctttttatttaaatgttcaataaatgatttcgttgctgctgtttttgctttatccaaatttccgactgccgtgtaataataaatgcgctgaagcatcccatctctccgggcagccacgtattctgccaactttaaatagtccaccctctgctgggatccgtacaaggcagtaagagcagcttcaaaattattgccatcgataaataccatcactctcttcacatttggtttccccctttgacatactaaaggcgccagcttcgatgctgacgccttttctgattctcttgtacttagctccgattgctaagcacctcacaacactgaaagacaccgcctccgactgacggtcttattatatccctttttggttaagttcccgagcttcttaaccttttcgaggtaaatatatcaccatcccggggaagctgtcaacagcaaaatattcttccatatacgctggttccgaaaatctacataactctatataatcatacagatgatctagatattcggatgattcgctcttgaaaacaggtcttagttgagccagtggaacagctgtacacacaactgctctatgccatcaccgtttcttcccacaaccgtaattttgaaaaacaggtaggccctcgcctaccctagagtaaaatgtaaccagtggtgacatttgtaataggagaaggcctgttttttgattggaattttattttctaaatgtcactatctatcgatttcatatatgccattcacctctgtgtagaaatccctgaaattaaggcgtctattaaactcatccactatctctcgctttttatctcgttttgtttccctgatgcccaaaaattcaagaatttcctttaagtgacccaactctaataatatgtccctataaaatatatggtttcgatatttccactgcatcctttcataggtgcatgtaactatcaacagagagtcatcgtactgaaaattgtctacaatttcccaatcatcgagtaatggtgacaaatataatattttattattatgaattgcaaatatatctaatgtgtgcctagcaccgttagaagggtacgtcttttttaggtataggaaattcatataaatacattttgttgatttaagcagtttatttaatgaatgaaataaatgaacttcattccttttctctgtatatcctgtaagagcattgaatattgtttcatggcgaacagtacctggcactgttcgccaattgtcgatgcgcagtttttttttccttacggggattgcgtttgataataaagcttgcatggttttctaggagaataatgagattatcccggctgtcatttccggaatcaagcctgaaaagcaatggctgatctgttagtttccgggcagattgaatggtttcttggatgaaatttggtgtacctttttggcagtggacacttccctttcgcatctcaacatgcaggcagtaaccttcctgtcccatgtaagcgaacataggggcataaccgtcacagcctttataggttctttcgacaccttccttttttgtcttggagttatcgaaaggggagacatccagatcaaccgggatatacggcttgtctttggcgtaaaccgggctgatttccgcatttgtatggcgaatcagatccagcgattcttcgtgcaagatcgttttccatttttccaccaaggcggcctggtccaatcgttgcctgagagtcgggctggaaggaaccctctggatatccaaagccagtgcaaaaaaagcatcatcacggaaggtttcaatattgtcataatcactttttacctggcaaagcaagccgatataagatttagccacatcgccattggaacaagccggataccgggagatatcagggagtttataggcattcaacctggaaactaaattcgtttgatttagtaaatttcctactatcgctaagccagcttgggcaacaattcgttcttttgtgggttctatcacaaactttttcatgagatcacctgaatgtggaatgaatttaatttgtctgatataccaattatactaaattttatgcgatttgtttgcctttaagcggaaatttcgtcacggattcaggtaaatatataagttgaaactttgttttacatccagtagagcgcccaccgcattctatcaaaatgacttgttatgaggaaaacagaatcgaacaatcggaaaatctttattgaaacttatatatcttcaacgtcgcaatcgtcatttggtgaaacaagaagacgcagtgatcattgccattcatcttttgggaaagctgcttggcttctcttccgaacgtgcatggcatcgctttgtgactgggaacttgtttacggatggacattttctcgaacgttctcgatacaatcgccgttgtcgagcgctgcgctttgcgatcaaatggattcgccatgagctagccaaacgtggacaacaccacgcctatgcggtagtagatagcgtgccactcgaattgtgccataccgcaagaatgtaccgagtcaaacgatttcaaggaatcgcggacatcgggctctgtgcatcgaaaaagcagtggtactatggatttaagctccatcttcaggtgaccaaccaaggactgcccatgggatacgtggtaacggaggcgtcctgtcacgatcgaactgcagctgaaaccgtcatgactcaaattcctcacctctataacttgggtgacaaaggattcatcagtagcgaattgcaaaaaaagttgtatgaagagtaccaaatcgctttttggactccatctcgcaaaaaccagaaacaccgcccatcggaatcatgggagaaatggctcaaacaaaaacgtaaagtgatagagacggtgttctccgtcctcgtttaccagtatcgtatgacagacattcgtgcgaattcgattgcgggatttgaagtagcactagatggcatcttgttggcatattcacttgtcacacttgggctagttgagcgctagcgctcaactagcaccacgagttttctaaattataataacaatctattgattttgtcaatcattttcattgcaattttatatatttttcttagctgtttcatcctctttccgtcttgccaactgcttgaaacacaagccactccctaatccatctttatatataatccccgccggattcaacgggcaaacaggtcttgcatagcggttccggcactgtgcgcagccgcaatcttttttaatgtttctccgagtgacaggatctcctcttttgttgtatggcgcccaaaggaaattctgaaaaactgatccattgcttcctccgcgtatcccattgcttcaactgctttgctcccgccttcatgatgttcctggcaggcgctcccggttgagatcgcaaatcccgctttgttgcactccaataaaacaagctgcccttgaacccctggaatcataccgccgacgatggaaggaagctgcatcgcccgttccccctctataaaaacaaccgtcccaccggatgccttttttaacgcggtccggtactcccagtcccgctcactttctatcaaaatctcctcggcagccgcagcaaatccggcaatgccaggcacattcactgtcccgccgcggaaccccttttcatgggaaaggtacggaaaaacgggggcgatgacgcaagaggggtgaatgtatactgccccgaccccttttggcccgtggattttgtgtgaagagagggtaatgctgtcgacataagggatcatgcgtgctacatctgctttgccaaatgactgcacacaatcggaatgaaacaggatcccccgccttcttaccatcagggaaatttcctcaatgggctggatggtgccgatttcctggttaatatgctgaaccgaaacaagcaccgtgtccggccggatcgctgcttcaagcttctttaaatccaccgtccctttttccgtaaacgggagccttgtcacttcaaatcccagcctttccaaaaatccgagcgctgaatggacggacgcatgctccgccatcgacgaaatgatatgttttccccttccggaagctcccattgcaagcgaaacaatcgccaataaattcccctccgtgccgcctgaagtaaaatacagcccttcagccggtacgccgagataaccactgatcaagccccgcgatttttcaagcaccgcccgcgcatccgtcccgatgtcatgcaggctttcactgtttccgtaaaaagattcggctgcttccataaatgtctcccgtgcccgttcgctcatttttgtcgttgccgcataatcaaaataaaacatggctggcctcctaaaaagtacttgtattcagtttaattttgtgcaaagatatgtgtcaagacagatgtaaagtagggagacggatgaaagaaaaaatatgtatcttgggaagcgggattgccgctctgcaattagccgtgcacctggacagccgctacgatgtgacgatcattacaaagtcgcaaacaaagacgagcaattcctacaaagcacaaggcgggatcgcagccgtcctctcgccggaagaccgttttgaattccatgtgaaagacacaatccgggcgggttgccggcaccataatgaaaaagaagtggaaaaattggtaaaagagggtgcggccgtagcagaagaactcgtaaaaagcgggcttcccgcagacaggcggccggacggcgggcttgatttagggcttgaaggcgcacatacagtgcaccgtattctccactgcggcggcgatgcaaccggaaaatttgtcattcagcatcttctcgggcaacttggaaaaagcgtccggattatcgaacatgagctggcgtttgaactcatggtatccgcagaaacaggacgcgtaaccggtgtaaaaacaaaaacggccgacggcaacatccgccactatttttccgatcataccgtgatcgcaaccggcgggcttgggagcttgtatcctttcacctccaaccacccggaaatcatcggcgacgggattgcaatggcatactgggccggcgcggaacttgcagatatggagttcgtccagttccacccgacattattgtatgcggaaggccgcgcgaaaggccttgtgtccgaagccgtccgcggagagggtgcagtgcttgtggatgaaaacggatcgcctgtcatggcgggcgtccacccgttaaaagacctggctcccaggcatgtggtcgcccaccaaatccatcagacgattcatagcggaaagaaagtttttctggacatccgtaaaatcaaaaactttgaaaaaaggttcccgaccatttcccggatttgccgggaaagcggcattgatatccattccggcctgttgcctattgtcccgggcagccatttctttatgggcggcatcgtagtagatacatacgggagaacaacggtaaacgggctgtatgcaatcggggaagcagcagcaagcggcgtgcacggtgcaaaccggctcgccagcaattcgcttttggaagggctcgtattcggcaaacggctcgcagcatttttaaatgcattggaacctgaagcagcgggcggcgaaacagcggaaatcgaccgccctcctttaaatccggaaatcgcccgccggctggacaccgtgacattgaagaaaaaaatgatggagaatgccggcgtgatccgctcagaaaccgggttgcggcatcttttgcagtggctgcaagctcgtggggctgatacgttttccgctttttcactcggccatcttgcaaaggaagaaatggaaaaagtctttatgtttaccaacagcttgctcatcacacaatcggcgctttgccggaaagaatcgcgcggcgcccatatccgcgccgattacccggatgaaagcagcggctggcagggtgtccatctcattcatgcaaaaaacaaaggcttaatcacacggaggggactttatgaacaagctccaacttcaatccatgcttaaacattttttcatggaagacattggggaaggcgatatcaatacggaatatattttttcgccggatcagccgggcaaattaacgtttattgcaaaacaaaacgggattttctgtggaaaggatgtgatagaagaaggtttccgcattctggacggtacggtgagaccgcgtatttttcccaaggatggcgcccggattgaaaaaggggcagctattgcggaaattcgcggccccattgtaagcctcctttccggagagcgggtaatcctgaatctcatccagcgcatgtcgggcattgcaacaaccacaaacgcagcagtccgcgagacggaaggcacccacgcaaagatttgcgatacaagaaagacaacccccggcctccggatgcttgaaaaatacgccgtcaaagcaggcggcggattcaaccaccggcgcgggctgtacgactgtgtcatgctgaaagacaaccatatcgcatttgccggcagcatcacaaaagcggtggaaacagtgaaagcatccatcgggcataccgtaaaaattgaagtcgaaattgaaacaaaggaccatctgcttgaggctgtccgtgccggtgccgacatcatcatgtttgacaaccgcacaccggaagaaatctgcgaatggctgccgctcgtgccgccccatattgcgacggaagcatcaggcggcatcacaatggaaaatatccggagctatgctgaaaccggcgtcgattggatctcgctcggatttttgacccattcctatcaaatacttgatatcagtgcaatcgtggaaaatacgaaggaggttgctttatgagcctgctgaaaacgttacaacttacggctttgccggaaaaatatcagtcccttgcgcaagaagaaatggaaaaccgggtttggaacatcaaaaaagaaatgggcgcgaaacttttcctcccgtgccaccactaccagcgtgaagaagtataccagtttgctgatgcagccggtgattcgctgcagctcgcgcaaatttcggcaaaaaaccgcaatgccaaatatattgtgttttgcggtgtacattttatggcagaaacggcggatattttaacatcagcggaacaaactgtcattctccccgacatgcgcgcaggctgctcgatggcagacatggccgacatccaccagacggaacgggcatgggatatgttgcaatctttgttcggggatacgatgctgccccttacctatgtcaactccacagcagcgataaaagcatttgtcgggcgcaacggcggggcaaccgttacctcttcaaatgcgaaaaaaatggtcaagagggccttcacccagaaagaacgggttttctttttaccagaccagcatctcggccgaaacactgcatttgatttaggcgtggaactcgcagatatggcagtctgggacccgatccggaacgaacttatctacgaaggcgcgctggaaaatgtgaaagtcattttatggaaagggcactgctccgtgcacgagcactttaccatcaaaaatatcgaattcgtgcgcgcgaaatatccggatatgcaaatcattgtccatccggaatgtgcgcatgaagtggttgccctgtcagatttcagcggctccacaaaatacatcattgatacgattgaaaacgcgccggccgggagcgcctgggcaattggcactgaaatgaacctggtgcagcgcctgatcaaaaatcatccggataaaaagattatttcgttaaatccggtcatgtgcccgtgcctgaccatgaaccggatcgacctgccgcatcttttatggtcgctggaaaatattgtcgagggcaaagaaacaaacgtgatcaaagtagaggaaaacacagcgcgggatgcggtgttggcgttagagcggatgttaaaactttaatgattcccggtttcaaattggcacgtgcttggactcaggggccccggttactgcgggaacccctttttgtctttttggcagattcctgagtctgtttgctttaaaaccacacttttcttttgcaactcccggtaatcgaaccattgatatattaatagctgaatgatgaaaaaattattgaaataaaacctatttaggcgtaagctggacatacatcaaatttttatatcacggaggtcctgtaagatgcgtctaagccaagtcataagaagcggtccaaaccaatacatatgtgaagaagatgcagccaaatatttggaagagaagctggaagaattcaaatatccggttgtcattaccggggtaaaatcattcaaagcatttcaaaaatttgcgtcaataccgcaaaactggccggtactccggtacgatcatactgcaagtgagaaaaacatggcaaaactggcggaacaggcaggccgtgcagatgtcatcgtcgggattggcggcggcaaagtgctcgatacggcaaagggaacagcagaactgctcaactgtgaagtcgtgctcgttccaacgctagccggaacgtgtgccggttatacgcctttatccgctgtttatcatgaagacggctcattcagtcatgtcgcttattacaaacgttccgcctttttaaccctgatcgatttgcgtattctcctgaacgcaccggccgaatatttgctgggcggaattggcgattctttagccaaatggtatgaagcagaaggcatcacccgttccatgaaacatttgccggtgatggtcgaactcggcctccgctccgcaaaagcgatttatgaagggatcttgcgcgacagtgagcaggcattacacgaccgaaacgaagggaagataaccgacgctttccgcaatatagttgaaattataattggcgcggccgggacagtcggcggctttgccggcgaatacggaagaatggctggggcccacgccatccataacgggctgaccttactgccggaaacgcattccattctgcacggttccaaagtggcttacggcatccttgtccaattagcggcaacaggcgatatcaatgaagtgaaaaaactgcttccgttgtatcaaaaactcggttttccttataatctggatacactgcatgtgacggaaaatcatggcgcggccattgaaaaagtcgcagcatatgccgcaaaacccgaagaatcctttcgcctgcttggcagctttacgaaggcgcaaattgcaaaagcaatggaaacaatcgaacagctcacggctgaaaaggctgatatcaaatgattggcacgggcggccccggaacaaggccgccttccccctgcttaaatgcaatccgtttgttgcaccattttttcaaagtttccgccttttctgtttgcatcacttgcaatagaaatggccgccatagcggactttcatacgggatcgcgatttaaaatgcagttatggaggcaattaggcctgccaaaaaattcgatgccatattaatcttcacccttacttggatctgcttcatccagagacaatctgaccactttcgtatattcaccttttgctatttcttccggcgttgctttttggtcgagctcttcctggtcgtcaaggccagtcgcaagtgtcggctcaacacgtccgttctctttttccactctctccacatccttattgaagtgatgcggctagttttccacggatgctcacaatttatgcgattgcagccgattgctcggttctattttaaaattttgaatttcttcttccggcaacccagtgtatttattgatcacacctaagtctggttgctccgctctgtttcagctttttcaattcttcctctgccagcccggtgtattttgcgattgatgccagatcctggttctcttccagcattcttttggcaatccttaatgccgctctcctttccccttctttcaacccctctttcaatccttcttcctttccttcttcttttccttcttcttttccttcttccttcccttttttgtaccctttgtcgtaaaaggaatttggcaggcgcaggatttggtcggcttcttgcggatccagatttttaatgcttgacatcacaagttcatcctccttatccgttaatttaaaataagaatcaaaaaatccatagatgagtgccattcttgccgggtcgagttccatgcgggccatcattcttaagaactctacttttacctgtactttttctttttttgtataccccattttgctgagcagtgcagccgcaacgggattgttgcttcgaatatattctttccagtttttcctgattaagtgtatggacatataacgaaaacggatggactcaaagttgcggattcttacggtgaaaagagaaggagtttccctgcgtttattataactgaaaacagcaattggcaaaaccggcaagcgatatttttcataaatgcgggaatagtaaataaacatccgttccggaaattccatttgataataagactgcggttccacatggatgaggacaaccgtgtcttccccttttaatttcaattttgccaaaatatcaattctgcgttgttcaccagctgtgatgtctgtaaacagatcctgctggaggaattccacatcagaaaagtccatccaccgcgctacttccgggaaaaaggcttccatgaaatctgcaaaaaaagtttggataagttctttaaacaagcggtcgtgcggcaaatactccgctttttcttccatcataagttgcatatgcatccacctttctttttccaaaaagatgatttcttttcatttgcaatgcctgccagagcgcgtcttctgacagctcccggctgccttgcaaatctgaaatcgtccttgccagcctgagaattttcatttgtgcccggctgctgaagttttccttgcttgcccactgcctcagcattaaactgctgctgtttgcgagcggatttttttgtagaaaaatttcgtttggcactgtaccgttacaaacttccgccccgtacctttcgtactgccttttccttgcttccgtgacgcgggttcggatctgttctgaagtttcgtttattttcccggactcttccagtaacggtactgtctcgactggcaaaaatatgtcaaagcggtctaacagcggtccggaaatccggttttgataagcttgaatttgttttggcgtgcatgtgcaatacgcatggggcgacccgagataaccgcatgggcacaagttcatggccgcaagcataataaaccgggcagggtaagtcaccgtggaagcggctctgctaatggttactttcccattttcaagcggctgcctgagcatatcaagcgttctttttggaaactcggccatttcatcgagaaacagcaccccgtgatgggctaatgaaatttcacccggatgcggccgggaacccccaccgacgagtgaaactgcagatgaagcgtgatgcggcgcgcgaaacggcggtttccggtgaaatccccttttcacgtttgcaagctgatagagtcccgccacttcaaaagaagacgtttccgaaagcggcggcaaaatcgaaggaaaagcctcagccagcatactttttccgcttccgggcgggccgtacattaaaacattgtggcttccggcggcggcaatctccagtacttttttcgcatgccggtgcccaagaatcatgctgaaatctgcttcgaacgaatactcatctggttgcagctgcctctttttccggacaggcggcagcttctttccggacaatgaatcgagtacgtcctttaaatgctggacaaatataatatccatcccgtccatttgtgaaaagggaagttccgcagaggctggcaaatacaatcttttcatgcctaatccccttgctgccatcacatacggaagcatcccagccactgcctgaacagacccgtccagtgagagcgcgcccaaaaaggcagtatgatcaggaattctggcatgaaaaaagtggttttctgccatcagcccgattgcaatgggcagatcaagtgcaggactgtttttccgctcgtctgccggggaaagattgacaatcgttttgctttggaacagcatacatccaatcgatgaacatgcaccccgtattcgttccttagattctttcaccgaagcatccggcaacccgacaatggtgatcccggacccgcaccccaacatcatctgcacttcggcatgaacacaatatccttctattccctttaggccaatgctgcttatgatggttgccatattttcgcaccccttcacccgaacttacattctataaacagaataaaagatcgtacgttcgttgtcaatctatttttcaaaaaaaactgaaaggaaatttgcacattcccgtcgaatactttagaaatccattccggaaaggagaataaaaatgaagacagcaattgttgaaaccgttttcgaaaagtcccagggatacgaggaaaaaggtgtgcaaatctggaaagggattccctatgcaaaaccgccaatcggacctttgcgtttccgcccgccggaactgcccgaaccctgggcaggcgtaaaagattgcacgcagttcgggccaattgcatggcagccaccggttgaattgatggattttctcgggaatccggctgaaaatatggacgaagactgcctgaatcataatatttggacgcctggagcagacggggagaggcaggatgacaaggccgcccggaacatgagcggcaacaaaacccattttatatcacacaccggcgatacggcctgcaccagaaaaggaaggctgcggggcaaggtcggccgctatatgactcaaaaacgacaaaaaacggcccacaccagaaaaggaaaaaacagaaagacagggacttttcttccccatgtccggcatcttttcccgccatcggtttggcttatgaaataagaacgtggcttttttaccacgctcttatttcattctgcaagcttgcgaatctgttcatttacattttcatggcacaggccgccgtggtagcagatgacggattcaatatcaaaatcaagcagctttttcaatgaagccattgcggttcccatatcaggcgtgacttgctgtctggggccatgcagtttgccgttgtctgcaaccatcgcatccgcagcgatcaatgttttgctctttttaagatacaggcagcaatggccaggcgtatgccccggtgtaaaaatcacctctattccgccgctaaaaggcagaacttctccatccccgatcactttgtccactttcgctttcggcggattcaaatacatctgtttcatttcttccggcatcgattcccatcttgccggatcgatcttttccggatccgctttgatcagaagcctctccccttcgatatatggcttgtccagcccgtgtgcgtacaccgtaatggaatggccagactctaccaatatttccggcacgctgccaatatgatccatatcctggtgcgtcagaataactgcgtccaatttttcaaacggcacgcccgccttctccatttctgcacggatcaaatcaagcgaacccggcatgccggcatctaccaaaaccgctttctgttcatcccagatcaaagtggggtgaatgataaaatggttcaggttgatttccagcatcgcaacgcccttggcaatttttttcaattgaatccctcccatctgcattgtcttttccatcttatcacaaaaaacagacagccctattctgctccctttcgctattccttccgaagctggagcttatggcactggtgcgcgccatcgctgcaccaataagaaaaaggaggactcctggcacgagaacgttaaaaacatgggtggccgtattaggcagcaccgtactaaatccgtttctcggtgaagaactcccggccacgccggcaacgccaactttataaaaccacaattggaaacggcatgttaaccttttgcatctcgatagttcttgataacgaattacaatgggcattgcatcaactgtctctcaaaataaatgcagctgaaagcggcgccattttttcgtaataacgaacaaaatactttctttttcgcaacattcctttgttttccttgctttttaaaaatatattgagaacaaattgttttatattacgaacaattcgtttttcactggggtgatttatccggaaacagcaaaaagccctgtcttacagagatagccttctgaaagacagggcgatatattcacaatccttgagcgcctgccaaaagaccgggggttgcccttccgaaaagcagccagtattttactttaacagcccatacgcttttttgtacaccgtatttgcaatttctttatgccctttgtcattggcaagccagccatcgcttttgcccgtggccgctttctctcctttctggccgtgtgtatcggaacggttcagccagacagattcaatattggcaacaggaacaccctttgccttccccacctcttcaatggcgcggtcataagtaaaagacacctgcccgctgttccaggtggtgagcaaaatgatttttgttttcttgccggtactctttctgatttcatccacaaaatgttcgagatctttcttaaattggccggcagaaacgtaagtgtttttggcattccggttcagatcaaatgtaccgaactcaatcgtcacaagatcaggatgattgaaaataatatggggaagactgtctgccccatgttccttcaggccggccccgctcttgccgtagccattgatggtcttcactttatatccaaggccttggtgaatgcgcgcagccaacaaagcgggatacgttttgctttttttcgttgcaaaatcccctgctgtcaggctggagccgaccggcaaatacaccagttctttccctttatgtttttcgtaaatctgttttgccgcgctttcctttgctgcctttgcctccaggctgcgcttcttttcttttgccaagtcttttttatattgctgctgtgctttttcaatcgtttttccggtgttcgcctgataataccagttaccgattcccagcacaccagccgtaatgaaaaacaataaaactacgagccatcctttttttcccaaactgccgtcctcctgaatggtttctgagactattatacaagatttgcctgtaagagggaaaaaggataggatgtggttgggtatccaaaaaaacttgctttgccgtatcccattacaccatggatgcctttattaaaaaagcccgcggatttttggcaaaaaatgaaagtttccgatagttaggcggggggaaaacaataacaagggcggagcataccaaaaagaaaattctgcctgtatcgtgcagatgaacgagaagccgggaaatcatgaaacctgattaaaagaggaggggaaacaaccatgaaacgattgcttccatttatgtcagcttcagatggcaaagatgcagggagcacggcagcaaacgataacgtttctgcattttattttgaggagaacggcggtattccgaataatccgtttctccctgtgctcatttaccacggtgtttttaaaggacggacagacgaaattgagaaagtgtttcaaaaaaataattggggaaacaactgggtatggaccattttcccttaccatcatttccacagcaattcccatgaagtgattgcggtacggagcggccatgccaaagtgcagcttggcggccctcaaggtaaaatttttacaatttctgaaggtgattgtgtgctgttgccggccggaaccgggcataaacggattgagtcaggaggcgggttcgcggtgacagggggttatccgggcgggcaggattatgatacccaaatgagggcagatgaaaccttgcgcgaaaatatccgcaaaaccggcatgccggaaaccgatcccgtgtttggaaaaaacgggccgcttttttcctattggacccctgaaccgggcggcaaagcaggatgagcggcagttcgcgggcagaaaggcctccagggcaggctggttccagcgcaaaagatgaaatttctttctcgtttgcattccatattgcataaaatgaaacccaacttgaaagactagccttgtattctttacagaaatgggtgtgaattatgaaggaaattttggaacaagtgaaggaaaagctcgaaaacgcttataatcatcccgattcagcagatttagatgcctgcatccggcagcttcaggatgcccgccagcagtacggggacaaagggacgatgattgaagatgccattacggcgatcgaacaggcgaagcattcgatcccggaacaccgccatgcaggtactgattcggcggcaggcgcattcggccaggcatacaacgcccttgagcatgccattgagtctttctctggaacggaaaataatgatccattttaaaaggcagatttttaaaaacagcatcgtgctccattcaaaccttggattttccaaggtttttctgttattccatccatgtagcgcgaaccgggcaacgattttggccaaggaagccaatactctccaaatgatttccgcaatcgcggtttcagcaacttctcccatgcatcccttaaaaaaagcccaaccgcgccttccctgctttttcaattccggaacctcccatttccaaatcctgctgctgcaaaaataaccgcaatcagagtatagatatattacgaaacacagcaaaaaaacttcaaggagggcatacattggaccaatcttatgtacaacaaggcaacggcagtatggatgccagtatggaaaaaccattatcactgaaaaaactggcagaccaggtcatcgtgatcaccggcgcttcgagcgggatcgggcttgccaccgcaagaatggctgcagcccgcggcgcacggcttgtactcgcagcaaggaatgagcacgcgttgaaaattcttgccaatgagttaaaaaataatggcagttccgccatctgggtgcgggcggatgtcggccgcgaagaagatgtgaagcatattgcggcaaccgccattaaaacgttcggcggctttgagacctgggtgaacaatgccggcgtttcgatttttggcgaagcgatggacgtcagcattgaagacatgaaacgcatgtatgacacgaatttctggggcgccgtatacgggacaaggttagccgtccagcattacaaaagccgcggcgtgtccggcgctgtgatcaatatcggcagcctgttcggcgaccgcggaaccgtcatccagtccacctatgcttcctctaaatttgcgttgcacggttttacggaaagcatccggatggaacttgaaaaagagcatgcgcccgtttcgattacgctcgttcaccccggccggatcgatacgccgtataatgagcatgcgtgcagctaccttaagaaacaaccggcgcattatatgtccatgatttacccgcctcaagccgtcgcggaagccatcctgtttgcagccgagcacccgtagcgggatatgtatgtcggatcgcaggcaaaaatggtcgcagtcttaggccgcttcttgccacggttcatggataaattaatggagctgaccatgtaccggacgcagcacagcgaccggccgtcaaagtcgaaagtggacagcgccctctaccatccgggttacggcctgcatgaacggggcacgaataaaggctggatgcgcagaaacagttattatgtcaagatgagcaaatatccgcttgcatcagccgccatagctgcatttgtcggggcagcgctctgggctgccgtttcagccaagcaaaaagattaaggggcaagccaccttgaccgcagggtggcttgttatggttgacattccgctgtttttttactgatggccgccagttttcactgattctggtcactcgataggctatgtttacataaccccaattttgagagtgttttttccacgtcctctcttttccctggctttaactgctctcccggcttttcccaacttcccgggtttcccatggcgtttcgttgataccaggcttgcatcccttcttgcatcgacaaaaaaggaaggcgccgcctcccttatgattccgccatcttgatgatccgcgccgggtttccgccgacgactgcattgtcgggcacatctttgaccacgacggctccggaagcgatcaccgcgttgttgccgatcgtaacgcccgggttaatcaccgcgcgtccgccgatccagacgttatcgccaattttcaccggtttggtcaactccaggccggacacgcgtgtttttgcatcaagcggatgtgttgccgtataaatatggacacccggcgccagcatgcagtttttcccgatttcaaccggccccccgtctagaattacacaatcgaaattcgcataaaaattctccccgacatgaatgttaaacccgtaatcgcagcggaaatcagattcgataaagaggcattcccccgtcgaaccgaataattttttcaacaatgctgtccgggtttccaaatcggtttcgtccgtttcattgaacgtacggacgaggcgtcttgcattaagcctcgcctgcgcgagttccgggtctcccgcattgtacaacttcccggcaatcattttttctttttctgtactcatgggccggcctccgtttatccctgttttttcttcggtacatattcaaaaatttttccgctctcaaaaaaatccacaagccgcgaaagccaatcataatattccgcaagattgccgagttcatttaagaagttattcagctgtttttccatttccggcggcagttcttcattggccttcagttccgccaattcacgcgcaaattttttttcaaaaaatttgttgcggtgaatgattttctgcaaattggacgtgaaaatggcaacaaacgtgtcgtaaaaatcgaggctgacattgtaaagatctttccggacccctttttcaaacactttttctgcgatattcatatcgaccatttcgcggactacctggctcatccttgtcttgctcatgcctgttgcctgggacaattcatcgagtgtcatcggcctgtggttcatatagataatgccgaggacacgcccgacggttggcgggatgccgaaagcacgaatatggtccgcaattttttcgatatattgttcagctctgaggagtaaaaatttttcgtgataatttaactatcccccccaaaaatgcggctaaatatgtaataatttaaataattagagcttgctggacgaatattttggcatggcttagtgacaagtcgaatacaagctaaaatttgattcgttcagcaagcnnnnnnnnnnnnnnnnnnnnnnnnnnnnnnnnnnnnnnnnnnnnnnnnnnnnnnnnnnnnnnnnnnnnnnnnnnnnnnnnnnnnnnnnnnnnnnnnnnnnatttactcttcagaactgtatattgttccttcgcctggacaaccttgtccaacgtcttttcttccatctcttagaaatgctccttttggccgctttttcaaatgccggaaaaaggtaccgtaaaaaatgaataacaaatcgccttcaattacaatatatatcatctatataataagtacaatacgtaaacttttcattttacaaattttacgttatacttatattgtaaccaatctttaaccaaaaaaactggaggtgcgaaaattgttaaagtttgaccacgtctcgaaaatttataagggcggcaaacgcgccgtggacgatttgaatctcgaattcgaatccggccgctttatcgtttttatcggcccgagcggctgcggtaaaacgaccacgatgaaaatgatcaataggttgattgaaccaacagagggtaccatttatatcaatggcaaaaacatcaaaaatacggaccccgtcaaactcagaagagaaatcgggtacgtgattcaacaaatcggtttattcccccacatgacaatccagcaaaacatctctcttgtcccgcgattactgaaatggcctgaagaaaaacaacgggagcgggccaaagaactgctccagctcgtagatatgcctgaagaatttttggaccgttacccgcatgaattgagcggcggccagcagcagcgtattggcgttttgcgggcactggcggcagaccagccgctcattttaatggatgaaccgtttggcgcgctcgatccgattacacgcgacagcctgcaggacgaactgaaaaagctgcaaaaggaacttggcaaaaccatcgtatttgtcacccacgacatggatgaagcaattaaacttgccgaccagattgtcatcatgcgcgacggcaaactggtccaaactggcacgccggatgaaattctccgcgaaccggccaacgaatttgtggaaacgtttatcggcaaagaacggctgcttcaggcccggccgaatatccagaccgttgaacaaatcatgagcccgaaagccgttacagtcacaggcgataaaacattaacagaagccatccaaatcatgaaagaacggcgggttgactccctgcttgtcgtggacagccggaaagtgctcctcggctatatcgatgtcgaaatcatcgaccgaaaccgcaggaaaccggttcttgtcaaagacatggtggaaacgaatttaatcgcagtggaaaaagataccctcatccgcgataccgtccggaaaattttaaaacggggcattaaatacgtgcctgttgtcgaccatgaacaccggcttgttggcattgtcacgagagcaagccttgtcgatatcgtttacgactccatctggggcgaagaggaagccgtatctgaaatcatcagttaggaggaaaaatcatggaagccttcatgcagtttatggaagccaactggagcgaactgttgttcaaaacatggcagcatttctatatctccattacggctgtcatcctgggcatcgttgtcgctgttccgcttggcatctggctgacaaaataccggcgggcggcacatatcgtgatgggcatagcgggcgttatccaaactttcccaagccttgccattttagccttcttcattccgatcttcggcatcggaaagcttcccgcaattgcggcgttgtttttctattcggtcctgcctatcttgcggaacacgtacaccggtgtaaaggggattgacccaaaactggtggaagcagggcgcgggatggggatgaccggatgggaaagagtgatccatttggaactgccccttgccatccctgtgatcatggccggcgtccgcctgtccaccgtttacttaatcggttgggcaacccttgcttcctttatcggtgcaggcggcctcggagactatattttcagcggcctcaatttataccagccggaaatgatcgcagccggcgcagtaccggtaaccattttggcgcttatcgtggactatctgtttggaaagcttgaaacgattgccaccccaaaaggtatccggaaacaaaaacaggccgcttagaaaggatgacggcacatgaaaaagttagcagccctcttgcttattttctgcttaagcatctttgcgggcggctgcaccctgccaggcctaagtgccgcagacagccagtccgtaaagatcggcatgacaaactcaacagaaacacaaattatcggttatatggaaaaagatatgatcgaacattataccgatataaaagtcgatatggtcaataatcttggttcgtcgattgtgctccataaagcgatgacaagcgggcagatcaatatttccgctgtccgttacaccgggacggatctttcgggcgcactcggcatggaaccggtaaccgatccggaaaaagcattaaaaattgtcaaacagcaatttgaaaaacggttccaccaaacatggttcgactctttcggatttgccaacacatatgcttttaccgttaccaaatccttagcagacaaagaccacttgacaaaagtttcccaattaaaaccagtggcaaaagatttgcggcttggcgtggataattcctggctgaaacggaaaggcgacggttacgacgggtttgtgaaaacgtacggatttacctttggaaatacgtacccgatggaactcgggcttgtctacaaagccgtcaaaagcgggaaggcggatgtcgtccttgcctattcaaccgacggaaggatcaatgcatacaacctcgttatgctggaagatgacaaacactttttcccgccgtatgacgcctcccctgtcgtacgggacgacacgttaaaacaacatcctgaactcaggaaagttttacaaaagcttgttggaaaaattgatacgaaaacaatgcagcagttgaattatgaaagtgacgtcgaaatgaaagaaccatcgacggtggcaaaagaatttctggaaaaacaccattactttgaggaggggtgatcatggaaacgatcagaagcgtacttcattattacggagaaaacggcaactatgtatgggtacagttttaccgccatttcctgatgtcggcatatggtgttctgtttgcagcggtcgtcgcgattccgctcgggattttcatggcccgccgccgcaagctgagcgcttggattctcgcccttgccaatatcattcaaacggttccgtcgttggcgatgctgtccatgctgatgctcgtcatggggctcggcaccaatacggtcgtacttgccctgtttctttactcgcttttgccgattttaaaaaatacatataccggcatcctcagcgtggatcaatttttgctcgagtccggcaaggcaatggggatgacaaagttccagatcatgcggatggtggaacttccgcttgcattgtctgtcattatggccggcctcaggaccgcgctcgtggttgcaatcgggattgcagccatgggcacatttgttggcgcaggcggactcggtgatatcatcgtccgcggaaccagcgtctcaaatggcacatccattattttagccggtgcaattccgactgccttgatggctgtcgccgccgactttatcatgggctggattgaacgccgcctttccccggtaaaaaagaaaacacgcaaacagaccgtagaacaggcagcataaaaggataccccgcggggacgcgggggatcctttttgataggcattaccggacggacccggtacagctttgtgccggatgttgcggtcgtgttcgtatccttttgatgtgcaattgcaacatctctatcctggaaatttatgcctgctgttttttatccctctgctgatacatgtccgctacagcatgggcgtctattgcatttctcgtatccgtgctgccggaactgcggctcaacggttcaccgagtttcttccccgatacgtctcgaatggccgctttgcccggctgacgagcgccggcaatccaacttgagaacccggagtggcctctaaaaacaggcggtttttctggagtaggcaaagggcagttttccaatccgggcgcttcctatttttcaattacctgcaaaattttcacatcccggggcgagagccggactgtttctgcttcagtgcgcccgtaaatcagttccgggtacgtgccgcctgcatccacaaactgaacctgatccgtatggttcagcaggaacaaaaatttttcatgcccatttttgcgcactgccacttccacaccacgaggagcatccaatgccggccggacatccgcttcctttaaaatttcttttaaaagagaagacaaatattgttcatccggctgtgtcccgatataataagcttttccttttccgcaatgatgcgcggtgacagcaggcgacccggccaaatagccgtctttgaaccaggccaaagcttcggcgcctttcaagtggatcttttcctcccacacgcggatagccgcatcgccatacccggtccggatttgatgtactgccccctttttcatcggcgcaaactcttcaacataaatgccaagaatatcccggtacgcgcccggatagccgccaagatacacacgttcgttttcatccgcaattccgctgaagaaattggtggcaaaataaccgccgttttcgacataggcttttactttatccgcaaatgtctttgtcacccggtaacttgccggcgcgaaaaccactttataccggtccattgcctcgtccgggtgaataaaatcgacaccaatgttttgggtatgaagcaccctataaaacggcagaagctgtttgatataggttacaagcgaagaaggttttgaatcgagttccaacgcccaccagtttttccagtcaaaaacaatcgcaacatcggatgcatatgctgaacccgttaccttttccaaatttttcaattcattgccgagttgtaccacttcccggaaattccggctttcttcatccccggaatgcggcaccatcccgctatggaatttctccgcaccgccctgggatgcgcgccattggaaaaacatgatgccgtccgccccgtgcgcagccgcttcataactccaaagccgcatcacacccggtgctttcacagcgttttgcgcccgccagttcaccgcgccggctgcctgttccattagcaaaaacggctgttttttcaaactgcgcgtcaaatcatgggccatgaattgcgcatacgggatgtcctcaaacggatctgggtaggcatcccatgtcacaagatccatttctttcgcccaatggaatccgtccaccggtttgtgcagccccattaagtttgtcattaccggcacatccggcgtatatgttttcaggatatcgcgttccattttataaagtgcaagcagtgaatcatccataaaggctttgtaatcgagctgttgcatcggattggcaaaagtcggcgttttccctggcagacagatttcttcccattcataataacgctggctccagaagtctgttgaccagcttttattcaagttttcaatcgtgccgtatttttctttgagccatgtttgaaaaccctttttgcagttgtcgcaatagcattcggaaatgtggcagccatactcattgttcacatgccacatgacaagcgcgggatggcttttgtaccgttccgcaattttgcggaccagtttcgccgcaagccgagcgtagtctttgctgttcgggcaataatgctggcgcgaccccggcaaaaagcgcgacccgtccttgtcaaccggaagcgaatcgggatatttccgcgacagccatgccggcggtgccgcagttgcagtggccaggtccgccccgatgccgttttccgcaagcatatccatgattttatcgagcgttgaaaaatcatatgtttcttcatccggctgcagccttgcccagctgaaaatgttgatgcttacataattgacgccggcttttttcatcagccgcatgtcttctttccatacagattcatcccattgttcagggttgtaatccccgccgtaataaaatttttcatgtttttttagcatcacgcattcctccaagttgtccgttatttaagtacacgccaccctgtaaattccaatgcttcaatgcttccttttttgaaaacgttaccataaaccaacaccatcgtactgcaattttacgcaaaaataaataaaaatttaaactttttaacttcctttttgcataatttttacgtaaatattttgcagaggaagcgttcatttactgctttctcttatggcaagttttgtccccagtctgacttttttagggatttcccggctgtttatacgttccagcaacaatgccaccccttcttcgcccatcacttcggtatacacttttactgtgctcaaggcggggaccgtatattgggacacacttacgtcattaaaaccgatcaaactcacttgttccggaacccggatgttattttcatgaagggcctttaaactgccgatcgccatcggatcatttgcaataaaaaaagctgtcggcaaatgatcccccctgttcctaatagcagaaatcatttgctggtagccggcacgagcatcatatttccctttaaaatcaaaaacatcttctttacgatagagccctaacttttgcatatatctggtatattcaagactgcgcggatcaattccggaattcatttcatcctcagccaacgacccgatatatccaatccgctgatgcccctgttgtacaaagtaatcaatgacatctttaactgcctgttcaaaatctaccataacctgatcagcacttcccacctcataataagtatccacaaagcaaatcggtttttgaaaagattgaagcacttgaatctgctgttttgagaatttcccaatcgctaaaattccttccacatcacccgggatcttttcgtattcagcataaacccgggagatggacaagccgtgttcctctgcgtatttttcagcccccaagcggatggacatatagtaaatatcattcagttcttcttcctgcgagctccattgtacaattgcgattttttccctcctggccgtttttttgtttatatgttttgtatagttcagactttcggctgcttcaaatatttttcgccttgtttcatcagatgccactaccttatcatcataattcagaactctggacacggttgcaatggatacccctgccattttggcaatatcagccattgtcgccataataaccaccttatcctttacgaaaactatatgtaaatttttatttatttttacgtaaaaaactccgcttatgtttattgtaaacagaacaattagtgataatcaaattttttataaaatattttttaacttatcttatgaaaaaacagggaccttacgctgtgcagtcaaaagagcctgcctcttgcttcttttttgattccccggcctttgcttttgaaccgggcaaacggctaaaaaaacaaacccgagggcaatccccgggtttgtgttcagacaaattattctgcttcttccaccacgccttgcatagatgcagctttttttccatggacaaaataataaagaaatacgcaaaggacaaggacaacagccatgatggcgtacaagccgtgataaccagcgaacggaaccaaaagcccgagcaaaaacggcccgaccccgacaccggcatcaagaaaaataaagaaagttgaagttgcaagcccaatccggtttttcggcgatactttgactgcaatcgcctgcccgcttgccgagaaagtgccgtacccaagcccgacgaaaattccggccaataaaattaatagtccgctgtcagcctggttcagcagcacgagccctgccgcaaacaaaagaaacgaaggatacatgacaaagttctcgccttttgtatcaaaccatcttcccgtaaacggcctggacacaagcaccgttacagcataaacaataaagaaaaagcttgaaatatcaacaagattcatttctttcgcatatgaagttaaaaaagacaggatgctagagtaaccgagcccgacaaatgcactgatgatggcaattgggaacactttcggctcaaagaaattgctgattttgagccccttcatcttttccagatccgcttttgaaagtaccactttcggcatctttaaaaagagggcggagataaagctcaaagccaatagcacaaggcataaagcaaataccatattaaaacttgcgtgctgaatgaggaacatgccgacaaaaggcccgacagccgcggcaagtgtcacactcaatgcataataacccgtgccttccccgcggcgttcatttggtatgatcccggcaacaatggttcccgttgcagttgaagctatcccaagcgctgcgccgtttaaaaagcggacagccagtaaaacacctagttgattcgtcacaaaataaaataatgaaatgatgataatcgcaataaaaccagcataaagcatctttttcctgccgatgcggtcaatcgatttgccggcaaagagccgcgcaaccaggaccccgacgacgaaaatccctgatgccaggccggccgcgcttggtgatgcatgaaaccggtcagtcgcaaaaatcgtaacggtcgccatcaataagtaaaatgtaaaatacagaaaaaagttcgcggtcgaaacaattataaaatcctttgtccataacttcggcctgctcaatttgtttcctcccctttgtgatctaaattgtctctgatttgcggaagcagttcgaataccatctcttgctccgcttccggaatccccttcattgcctgctgttccaatccggtaatttccgcgcggcactgccggtagaggttttcgcctctttccgtcatccgaatcactttttcacggcggtcttttcccgggatctgttctacgattccctgttcttccagcttttggacaatccttgtcacattcggtttttcaatttgataatacttgcaaatttccacaagtgtgcacgggccgaaattccgcacataaaacgtcacctgccagagcgaataggacaacccgaactgtgccaataagccgttcaatttcttgatcagtacgcggtacaagcgtatatagcggtaaaacagcccttgcatcaagcaagcctcctccaatcccttgagcatctgcccgggctcgcattagaaagctccggccacagcgaaatcacacaaacagtttcgttaccctaagcaacatttcacaagactaaatatacaggttcattcagtcgttgtcaatgggcggttatactgataattcaaaaaatgtatccatgttcctgataattcggtacgatttttctcttgtttgcgtttgatgcatttatttcaaggtttgttaaaccataatcattccggcaagagaatggattctttcagtgtctctttaaaatcatcttcaaagctagatgctatataaatacaaaaagtttaaatttttcgccgccgatagttgacgatccggatgggaaaagtttatgatataaaaaattgagaatgttttaattacaacagcttggtcatacagacggaataggaggaatatgtgtggcagtaaccattggggcacagttggatcaacttgctgttggaaaataccataagcgcgcaacgatcattattggagtcggactattttttgagtttttcgaagtatttctagcaagcgttctgggcagtgttctaagtgaagaattccatgttaagtcatccatgctttcattattattgggttccagtttcttaggagcctttgccaaaatgctannnnnnnnnnnnnnnnnnnnnnnnnnnnnnnnnnnnnnnnnnnnnnnnnnnnnnnnnnnnnnnnnnnnnnnnnnnnnnnnnnnnnnnnnnnnnnnnnnnnttattttggcagaggctctagggatgtttatcggagctatctttttgggcagactggccgacaaaatcggaaggaaaaaagcatttcttatcaatctggggatttacagcatttttaccttttgcattgcattaagtccgaacgttggattcattattttattccgttttttggcaggcttgggtctcggtgcacagcctgcgttatgtgatgcttatttaagtgaaatcatcccgacagcaaagcgcggaaaatacattgcctgggcctatacgctttcatttctctccattccggccgagggattcctggctcgcatgcttgttccgttaacaccgcttggaattgaaggatggagatggatgtttatgatcggttcgattggtgcccttattgtttttttaacagcacacttgctgccggaatccccgagatggctggcaacggcagggaagtgggatgaggcggcagaagtatttaaaaaattgggtggcagtaagacacaagcagaggaattccgtgcaaaggcttccctgacacagcgtgatgccgctcaacaggacaggcaaagcaggccgatcttccaaaaaaaatggatgaagaatacaatcatgctttacattttccaaattttccaaacgatcggatattacgggtttggtacactgtcacctcttgtgttagcgcaaaaaggttacaatattagtcattccttagagtatattgcactctcgtttatcggctacccgcttggtgctctgctttccgttccactcatcgaaaaaattgacagaaaatggcttgttagtgcttcagcttttggcatgggcgtgtttggaattttatttggaatggggactattgcttccatgatcattgtttttggatttatttatacgctgtgcagcaatattttttcaaatgcttttcatgtcctgcaggcggaaatctttccaactgagatccgggcaacggcaaccggtgcagcttatagcgtaagccggctgatgagcggtttaatgcctttcattctattgccagttttggagcatcaaggtgcaacaacaatgtttgcgatcgtggcgctggcaatgattattgtcatattggatatctcccttctggcaccaagaacaaccgggcgttcactggagcatattgaaaatgcgtatgatgatgcgccgcctattcgcgctgatggtgtcgaagcaacaaaataacatgccatatcatgcggcggttacaaaaagaggatatttacaccttcaaaggtacggttattcatatcggtaaaatccactttttcattggggttgcaagtgaaacaaacgaactcgcattggccggaaatttgcttcaaaaaggctgccttagaagcttccggagaaaccggcacatgcaggcctactttcacagcagaagcccgcttcttcactgtttgataaaaagcctggtaaaagtttttttgcgtgccgccccactccctgaaagccaattcaaaccgccatttttcgacaaaagggctgccaaagtattgaaggctgtgctgtaaaaaggcatccagcttctttaaatatccggcactgtctgctgcttctttctcaacctccacgcgaatgaaaggcacaagcccaagccgttgaaaactgttcaacagggcatccatctggtaaaattggtaaaattgcccgccaatttgatagaggggggtgtcatcgcaaagctgtccgaaaacagattagaaaaatagacatagtcaaatccgatttcctcctggacgagcctcaactccgcctgtacctcttcatgcaaagcacattccaggttcccgattgccagtatttttgcacctttttcgccagtgaacacaggctccggcggcagatcgatatagacggtggagaccgccagttccgtcagcatcgtgcttttttcccggtccgaaatgtatttgctgacttccatgaaaaattggggcgacttcagcaatgtggattttttctttcctcgcccttcctccgtatccgaaagttcgatttggtgaaaacggcgatattcggaaggcgtttgccggtatttttctttaaaagctttattgaatgcctttacatttgggaaaccattgttcagggaaatccgggtaatcgggtggtccgtataaataagctcgcggactgccgatttcaaacggagctgtttgatatattgggagaaactggcacccacttgttctttgaaatagcgggataagtagtaaagcgacaaataatgacggttggcgatttgcgcgagtgtaatcggtttacggtaatttttcccaatataagcgagaatctctttcatccgttcatccttgatgccggtgtgggcatggcggacgagccggaaagaggctttccccttttggaaaacgtggaacatgttcgtagagaaaagtacgtcgcattttagtaaaactttactaaaaaatcacttgacatcgcggttagattggcatatcctttctttgtaagcggtttatgttagcgcttttatgattttcctctattattctcgtttgaaactccaaagtttttagtaaaaattatgaagctttatacaggcaaacccaggcaggaggagttaagaatgaaacagttgaaacagtatttgtcatatgcactcggggcttttggacatgatgctttttacagcgctttaagcacctattttatgatctttgtcaccagccagctttttgacaacagccattcgggattgggtgcgaaaatgattgggattgtaacgaccatgatcgtcgtgatccgtatcgctgaaatcacgttagatccgtttattggcggtatcattgacaatacggaaacgcgttacggaaaatttaaaccatggctgtttaccggggcggctgtaagttcaatcgggctgattcttatttttaccaatttaggcggcttaacgacaaaaagcccgtatctttatttgattctatttggcattatttttgtgattcttgatgtattttattctattaaggatatttctttctggtcgatgctgccggctttaacgattgattcggataaaagggccaaattcggcacgatttcccgtttcggctctacgttaggagcccagggcgttgtcatcgcggttgtaccgctcgttacttttttctcccatattttttccggtacatcaggtgagacggaaacacgcgccgggtggctcggttttgcaattgtcattgcgcttgtctcttttttaggggcgatggccaccatttgggggacgaaagaaacaaagaacttgatccgggaaagcgccgagaagattcgccttcgcgatgtgtttaaagtgctcggcaaaaatgaccagttaatgtggctggcactctcttattttctttttgccttcgggtatacgattacaaactcgcttttaatttactattttagatatgtgttaggaagacagagtgattattatttagtcggcgtgattacggccatcttaggaatggtatctgttgccctgttcccggtcatggtgaaatgggtgaaacgcaaaaccatttacaccggcggcattatattcatgctttgcggttacgtgctgtttttaacggccgggcatcatttaattcctgttttggttgctgtttcgctgtactttttcccttatccgatgattttcctggccgcgcttatgacgattaccgacagtgtggaatacggacaattaaaaattgggaaccggaatgagtctatcacattagccgtacgccctttgcttgataaactggccggcgccttttccaacgggattgtcgggatagcggccgtacttgccggtatgacagggaatgccctcccgagtgatatctcaagccatgggctgtccatctttaaacttttcattttcttcggcccgatgattttaattgccattgcagcattgctctactttttcaaaatcaagctgtcagaagaaaaacacgcgcaaattgtacaacagcttgagcacaaactaagcacaaagtaacagcataaatgtgaacggccggcagaagtgtaaatcatgatgctaggaaacattttgaataagaagttttataaaatttgcgttaggcagcaacttcaactatctgatttgttcagtaagccctaaacgaatcatgcaaaggccgtaatatttcctttccgcctgttcctggcagcctgtgggaaaacaggttgccggccatgggaacaaaacgaatttgcccgcagcattcctttatttccattttacgccaagctcatcgcttttctgttgaatttgccgaatttcctcccttaccgtccggtcgctaatgcccagccgctccccgatggccttcgcattcagagggccatccgacttttgtaacaaccataatatttgtttttgccgattcgaaatcaaggcttttattcccctttcactgccctgctgtccattcatttttatagaacgatatacgaaaaagggtgcttccgccgtttcgaagcatcctcttttggaaaactttttttgcaaatatgtttgcctcttgcctatcccgcaaagacttcacctcgcgtgtgatctttctttcattaacgggaaggcaaagcagaggccgatgataaaaaataacgccgcaatttcaaaaacagccgtcaccgacagccatactttcaccaggccggcaaggctcatcgtgatcaccattgcccccgtgaaaagcgggtaaagcgtgccgttcaccctgccaatatagtccgattccgtattttgtaaaaccattgtgctgatcccgatttgaatgcttggcaagaacaggccggaaaccagctccgcagcaagcgtcagccaaagagaagttgacgcgccgatcaccgcaagcccgagggcattcgcgagcagtccggtaacgagcaacttaagcggggaagtggatcttgaaaaaaacattgaaaacgcgccgcctgcaatcatgccgatcccgtttaccatcacgagccactggaggtattctttcggaaggccgagacgatcggttacaagaaaaatattcattggctgaatgaaaccaacgccgagcccggcagtaagaaatccgcagccaagcagcctgagctccttctttgcaagcacataacgaaccccgcttttcatttcctggaaaatatttgtcatatttttggccttttttactttttcatcgcgcggaataaaagacaaggtcgctgcggagagcaggaaggccaccccggtaatggttatcgaaagatcaattcctaacctttgataagcaaatgtgccgatcaccgggccgaaaatcatgaacacggcataaatcgtctggtacaccgccatcccctgctgaatcaggctttcttccagatgcattttgaacagctttaatcccgacggctgcgaaaattgcgataaagtggaagaaacgagcatggcaaaaaagatcacctgccacgaaccaaatataagcgcaccgatcacggcaaaaaccgaggcggcactaagcaaatcgcaccagatcatcgttttctttggctgccaccggtccgcatatgccccgccgataaaactaaagatgaaaattggcaaatagtctgcgactgaaatcatcgataccgcaagcggatttccgttcgttttatctgtaacaaacaacagtacggcaaaattccgtacccagatcccggcttgcaaaaataattccgataagaaaatcatccggacaaaccggttagttagcagttctctcaaattttatatcctcctgcgccgacaccattgtacccctatcataccggaatcaccaggcgtgtgcaaggtaaagatatttgacgatttcccctccgcacagccggattcttgtggtgaaataatgaaaaatctgccaataaaaaagtagacttgcatgaaacctgttctgtttttggcttttgctaaatactgttaaagaagatttgtgaactaccctccacttaaatcattagtaaaataactttggctaaagccaaccgaaattcatctcccacctactcattggtgcgattcgcaccttcacattccttgaggatgggagacttctttcggaaagccgttaaaaacacagattcggccacgatccaaaagtatttttgaatggccgtttttgaattcttctatataaaagatgcaaagcaatacaccggtacaacggtatttttaatttctgctgcattgtgatggatcctattgaaaaattccatatagcttggggaacgcacaaaagaagtacatcacttgttgtcaagtatggcagcctttatccccgccctatacctgatccatgaatcgttatgccccaatttgtgcagccggcctgcacccattatgcattatttctcactacattactcaaattcgctgattttcaccagctgcttaccgatattttttcctttaaacaagtcgagaaaagcgtcaatgatcgaatcaaaaccttctgttatcgtttcttcatattttaatttgccttcgttcaaccaggcggcaagctgggcgccggcttctttaaaacgggaactgtaatggccgactgtaaaaccctgcatcagcgaactcgttttgattaaataactctgtacacgcggcccgacatccggctctgttttattgtaagcggatatggcgccgcataccggaatgcgcgcaaaattgttcaacagcgggaagaccgcgtcggaaatttcaccgccgacattgtcaaaatatacatcaacaccgtcagggcaggcttccttcagtgcctttccgacattttccgttttataattaatggcagcatcaaaccctaatgcttctgtcaggtagcggcattttttctcagatccggcaattccgacagcacgcgcccctttgatttttgcaatctggccgacagcggagccgaccgcccctgcagcacccgatacaaccaccgtttcgcctgatttcggcttcccgatatcgatcaggccgaaatacgcggtaagcccggtcattccaaggatgccaagattggccgtaacgggcgcaagatcgggatccagcttccggatcattttttcatgcgcaagcgaatatgtttcccagccaagtgagccgatcacgatgtcgcccttggcaaattgggcggacttggatgcgacaacctgtccgatcacgccgcttacaatgacatcattcagctgaaacggtgggatatacgatttcacatcctccattctgccccttaagtacggatcgacggagatatacacattccgaattagcacttcgccttcacccggtgtgccaattggcgcttcggtaaaagcaaaatcttccattgttggcgttccaacaggccttctcgccagccggatctgttttttattcccctccatgaaaatccctcctgaaaaaccattttcctctaatttaacattccccaattcggcggtcaaaaataatgcaaacaagattttccggatattggaattcaacacgcactggtatgatgaaaatccaatcaaccacgcgctatgcgaatgcaccataagccgcaatcagcagggccaagctggctgataaagcgtacagggatgtcacctgtttactttgattttttaataaaaatattcaaaaacaatttacaattttgctgaaatggattatcctatatacataacacccaccaagctttgtgcgatgttccatccccggaatacgtgaacaaagccagccgggggcaatcctgttgatgaaagacataactgtttattctgcctgcttattccgcaagataagttgttcgacagaaaaagccagtcatttttatccgtgccttttggatgcaaatactggttttttctattttttgaaaggggtggatagattgaaagccgcattgtccgggataaaagtgcttgacttaacaagggtgctggccgggcctttttgcacaatgatccttgtcgatctcggtgcagaagtgatcaaagtcgaagcacccggcgggagtgacgaaacacggggatgggggccgccgttccagcaaaaagtaagcgattactatttatgcgccaaccggaataaaaaaagcattacgcttgatttaaaacgtgaaattggaatcgtttgtaacaattcttctcttccttccttttttcccttcctatacccgcggtcaaggtaagaattcggcagctttattacttgttctgcttcgtcacaagccgggctcaatgctttcccccctctatctgccttttgattttcaggatctcctcttcactcaagccggatgcttgggcaatgatcttcaaatccacttgattttttaacaagttggcaataaatctttttaacttttcttcaccttcttctcttccttcttcttttcccttcctatacccgcggtcaaagtaagaattcggtagctttattacttgttctgcttcgtcacaaaccgggctcaatgcttttccccctctatctgccttttgattttcaggatctcctcttcactcaagccggatgcttgggcaatgatcttcaaatccacttgattttttaacaagttggcaataaatctttttaacttttcttcaccttcttcttttcccttcctcttatttttcagttttatttcaaaggacactcgccctattttcaagtgaattttactatctgcaatttgcaaatttgatccgccatttcccggtcgtgcaagtgcttttcattgacttagcagacgatccaaactcataataaaattgtgaagaattttacaggaggtatgaagttgaatcatatcaatcttggcaagagcggtatattgggatcagaagttgctttaggctgcatgcggatgaatgcgttatcggaaaaagaggcacaaacgatgattgaaacagcagtcgagcatggcatcaatttctttgatcatgccgatatatacggaaaaggagaatcagagaaaatttttgcaaatgcgctgaaaaacagttccatcaaacgggaagatatcattctacaatcaaaatgcggcatcggcgacaaaatgtatgatttttccaaatcgcatattttacaagcggttgacggtattctggaacggctccaaaccgattacctggatatactcctgctacaccgccctgatccattaatggaaccggaagaagttgccgaagctttttcagaactgcaagatgccggcaaagtccgccagttcggggtcagcaacttccatccgtaccaggtagaacttgtccaaaaattcgtttctcaaaaactgattgtcaaccagttgcaattcagcatcgcgcacaccggcatgattgacttcgggatgcacgtcaatatgaaagacgaacgcagcatcgaccatgacggcggaattctggaatattcccgcctgcatgatatcaccattcaagcttggtcgccattccagtacggattctttgagggcgtctttatcgatgatccaaaattcccggaattgaacgaaaaacttggccaattggcacaagcacaaggcgtctccaaagaggccgtcgcgaccgcgtggattttaaggcatccagcaaaaatccaagtcattgccggaacaatgaacccggaaaggctgaaaaaaattacagaagcatcaaaagtaagtcttacccgccgagactggtatgatatttattttgctgccggcaacgatttgccttaacgggtatattgttggatccaaaaacagcagtgggcctcgtgatcgtttcccttttaaaacaacagagcagctttcccgctttagcttcataatgataaaaagatgccgtaccaaacaacggcatctttttatcatccttacactgcttccctttccacgtacttcgtctcgtcggaaaatgcccaaacgatccataaaatttgataaactatgggaataaaaatatacaacagtacataggcgccatgcttgccgaatgcttgaagcaatttcacttgccaaaagataataaaaataaagttcacaaccggtacgagcagaatgagcacccaccagccgcttttcttaatcaaaagaagctgctggatcacattacagaccgggacccaagccatccaggcaatgtctccgcgcccggctttttgggccaacttcataaatgccatgccatttaaaacataaagcgcaattgcaataaagacggcgtataaaattgttgccattatgatacccccactgaattagatttccggcgttgtacaccagacttataaaatatttatgacccggcccctcccatccatgcctccgtaaaaacaaagcaaccttatctggaaccttgctcttatctgccttcaaaataccgggcctttacatacagaaaaagtaattaaccctattagcttacgcagcaatctatttattttccatgcaaagtagatggccgctttttctggccgttcactttccaaaaaattcaagtggataaaattcgtttgaaacctaaattgtccccacttattctcagctccattatgcaaatcacaatcccccattccgaatccttttattcaaaatgcttcatggtctttttcaatgcagtctggtcgaggacgatttccgagttgttgttttttaaaatatcgtcatacatgcttttagaagtgcctttcagctggtaataggtcacttgcttatctgtgttgagattttttacaagcaggccgaggcttgcgatatctgttttggacatattggtagcgatgacaaaatcagatgatttgtccaccagttttggcagtttcgttaaatttttcggctggagtgcggttttggcaataccgatcagcacttttgcctgcaacagctggcggtcatagtccacatttttcaacgaatagcgttcatgtacaagctctgtcaccatctccccgtcaagcgcctgcgtgccttgtgcgatgacttttccattgttttccgggtaccaggggtgcgtcagttttacatcaaacggcacatccacgtcaatcgtccccagcgcatccaccatcgactgcaagccttcataattcgtttctacataatagttgaccggtatgcctgtcaattggctgattgaattgactgcggctttaattccggctgttgtgccgcctgttgcctgtttaatatattgcacgcttgtcagtttcgtatagccatagccgtcaagatacacgcgtgtgtcacggggaatgctggccatgttatacttgtgcttattcagatcgacatgcagcaagataatcgaatccgagtggcccaccttctgcccttttcgctcatccgaaccgagtaaaaggacattgaatacgttttccttcattttgggtgttgttgtcccttggctgcccgggttgttccttgttttagaaacggtcggcacgtttttaaaatggttctctggctgcagcttttggtaagcaaaataagccaccccgccgcccaatacaacaaccgccagtaaaatggataaaaagatcctcagttttttcatcatttcccccaaaatcatttatgtgtaaactatttaaattatataacatttttccatccaagactatacaattcgacaaaattttgttgtaactggcaacttattcatatgatatctcaccttccccatgatgccacaagttgaaaatttgtctgttaccaaacaatggggccatagtttcctgtcctatgaagaaccttctcatatttttttcagattgaaaatccccacttttaaacggaacccagctgcagccccgctggtactaactgacttccccggaattcccgaactactctggaaaacaggatttgtagctttaaaaatacgataaatccctcatacaaaagccctatagtatgtgtaaaattttnnnnnnnnnnnnnnnnnnnnnnnnnnnnnnnnnnnnnnnnnnnnnnnnnnnnnnnnnnnnnnnnnnnnnnnnnnnnnnnnnnnnnnnnnnnnnnnnnnnnaaaatcggctctgccaaagctgataaacatggtagttacaaaataaaaatcagcccgaagaaaaaagggactgcggtcaaagtaaaagctacagataaatccggcaacagcagtggataccggacggtgaaagtgaaataaaaaggcataaaaagcgcagtggttcagctgcgcttttttggtattaagttttccaaaaataaatggattttgctgctttttgtacgtgtttaaagggatttccctgtcattcttagacaaattctacgttaatcagtgcggccaatccgttgaataagccgggtttcgtttcccgtttccattttcatcatcatccacacccatgtcgtgctctttcaatgctttgtttaattttgcagcttcaagcaggtcaggtgtttcgtatccgcttttcactgcccagatgtaaaaaccgagcgaaacgaaagcaatgaggaccatgtcccagccgtacggaatcatgttaaggccgccaaatttctcacttccaaaataagagatgcccatcatcacaatcagataggcgaccatccaaatgccggacttgaaatttttcgaaaaagactgccatttccttttcgcctgatagtaaaaataaatgggaagcccaatcataataatgaggaaaacttccccggtaagcggccaccgtgcccagtatagcgtcagcgaagcaaaaataaatccgcatggcgcgatgatctgcatgcccttcacctggagcggacggtacaagtaccccgcggtttttcttaatgccatgacagttacaggcccggtgatataagaaatcaacgtagcaacagaaataacctctgccagtgaaccccatcctttaaatacaaacaggaaaataaaacagatgactaaattgacaaacatcgccgggcgcggaatgccataaaccggatgcagtttgccgataaaccgcggcaaatatccatttttctccataccatacagcatacgcgcagttgttgcagtataagtagtcccggtgccggatggagatacaaacgcatccaaatacaagacaatcacgagccagttaatatttaacgcaatggcaagatctgcaaacggggagttaaaattcaaatgattccagccatgtgccaggacagaagggctgacacccccgataaacgcaatttgcagcagaacgtaaatcaccgttgcaattaaaacagatccaacgactgcaatcgggatcgaccggcccggctttctcgcttcgcccgccatattaatcggactttgaaagccgttaaacgcgaacacaatcccggatgtcgccaccgccgtaagcacacttgaccatccgtatggggcaaaagcatggccgtatgtaaaattgccgccatggaatccgacaatcaaaagtgcaaaaattgtcaaccccggaataacgattttaaatatggtgatcagcgagtttacccttgcaaataaactgactgcccagtaattcagaaaaaaataaatcaacagcagtaaagaagcaagaccgagtccttttggcgtcagcattccgttatgtgccaaactctgtgcccagctccaatgccatgagctcatatactgcacagaagccatggcctcactcggaataacggaaacaatggcaatccagttcgcccatgcagcaaggaagccaacaaaagaaccatgggaatattgggtgtattttaccattccccccgctaccggaaacatggcccccagttcactgtaagaaagggcaataaataagataacgaccattccgatcacccaggcaaaaatggctgccgggccggcaatcgtagctgctttccaggcaccaaacaaccagccggacccgatgatggacccaagaccggtcatggtaagcgcaaaagttcccaacttacgatgcatcatgttcatacagtatccttctttcttttctgtgttggccaagttgaaaatacaaaaagagctgacatgaaaaatttgattaaaattttactttattttaccccggcacaagcaagagaaactcatccgcctcctctaatgacaaaatttataaatgcataattccattttatctttaaaaaatgcgaatgcccaatcatttgaatacgatctatacaatatcttttccctcgtgaagcaagtggattcccggccagattccagactgtaaatggacgggccggctctccttttcattcggattcaacagttggcacaaaaaaatcgatccataatagggattctgaacgaatcggattttggnnnnnnnnnnnnnnnnnnnnnnnnnnnnnnnnnnnnnnnnnnnnnnnnnnnnnnnnnnnnnnnnnnnnnnnnnnnnnnnnnnnnnnnnnnnnnnnnnnnncactcacgaggagtgtgacagctattatcgtgtagaaatttaatagattttgacgaatatctacaaattaccccatattatcccaagttttgctacacgaaaattcctttatatggaaaaatctattggatttttggtgcgaatcccttgggaaattcatgtacactattcattcgcacagttacaccaaaaagcattcttattacagactgctatgtcgtaaaaagcagcacgttaaaaaaccacttttataactaatcgttcttacgagataaattggactggttaatctttgtttttctactatataaaatgaactaaatcgtgttactctgtttcccgctgcaaaaagtcatcagtactactacgattaatttcagcatcggcgtctaattcgacagatgttgaatatcctattaaaactaattaatcattctaaggaccttctccactgttaggttttaagtatctggtaagcgtctgacccaaaccaaagagtggcactgaagtaaagccctgtatccaaagacaacaactcagttgacaattttgacatctttaaaagaattcacaattttatacagtgttactccctcgggcattttttcatcaaaaacgacggtataatctttatacgatcttgcaaccttactgtgatcaattcgatggatttcaattttctcgaacaattgattagatggtgcattacctaaataactttcatgtgaaaaaacatataatccccggcatgccatccggccgcgggaggctgaatgatccagatcccacatgttaataagcgactcccacagtccttttaaatcctcttctcttactcctgtctgaactgcaaatgatggtgtataaaaaccataggcgatatataaaccgtatggcacataggcttttctccccatttggccagtacgtgcctcttcatcagtagctttcccgcttttaatatcatcagcattcgttagtgcaacacgagtaatactcgattcagcaggaaaaataggatcaaccgagcgtgcgaatgtcagttggacagctccccgcacttgacctgcattaaatttttttgtggacattacagcgccaaacatacgtgtatcaaaataatgttcgcacatccactgccgcgcatcttttactgttttcgggctgtcgtcgttttcctgtttttctaattgttcataagccttcttctgctcctttgtgagaatcccgcgatgcttgacataaatatcaaaaccttccaaatgccctctggtcaaataaatgtaatcccttatttttctttttattgcaacgtccgttacgataccctgcattgtttccggatcaattctcggcagattgcctgcatccggatcaccgttcggatttccatccgtcacatcaaaaacgagcacaaaatcatagcgtttgtttggatcaataattgaatttatgttcatgtattactccccctcaacaacggttttatttaaatcacttacattggcagcatcagcaggcatattttcttttttcttgtatatatcttgtctttcatgatagtagcctagcgcaaactcagcctgtccttgcaaatcaaggacagctgggaattctttcaattggccggttattaattgaatcctttgctgataacgaacttcatatcctttgttttctttactaattttacttaaatgccatttgctatttctcattaaaagcccgaaaattgtccttggagtagatgaagctgccgcatagaaccttgaagcaatcgtttcgtttccctttactgcttcgtattgtaccgcttccaataccgcaaacaacctgccgcataagtaaggcggcgtgattctggcgtgatctaaatccactgtccattcctccttgttttggctaattagccagcttcttattgctgctgcatgtatccatgtcataccgccccttgcctgaattcttctcacgatttttgctacgatccgctctgagagtcttttgccataaagtgcccagttcatccagtcctgaacatcttccttctgcatttcctttctgccgtcacggtacatgcacgccgccaataaataaatgctggccggttttggcgctcccacaatttgttgtgcatcaaaaaattgccggatttggtttttcaccttccatacaggcggctctgcatagtcgcggacaaccattctggccttgtttgctgaaagtgctaaaatacatatacgatctaaagaaccgtgattttcggcccgtttgaacggcgatgatagaattctccggactgcaacaggatccgggtcggatagaaacgtaaacatgctggtcgtttccggatcgttttgccttgcccaataaacgtatgttacattgccgatttccatcatatgcgggccgccgtgctgctttttgtttgcatattttctcaataagtacgagagcgcttgcccgtatttttgttcacattcaaaacaagtaggtgcaatctccgagttttccaatccgtatgaaagataggcactttcattggcagaaataagctttgtcctttcttttcccacagaaaattcaatggtatggcgttttactgccggtgcagaacgtccgcaaatgaagcaaacactatcgttctcttcctttgagctataaagataggcactttcattggcagaaataagctttgtcctttcttttcccacagaaaattcaatggtatggcgttttactgccggtgcagaacgtccgcaaatgaagcaaacactatcgttctcttcctttgagctattctttattagaaaatcctcccaaaacttttttactttattgtcttcatggggaaaatcgcccgcttccgtccgaaacaagatcacatcagtagatttcataccgtctggaatctgccagtcttgcctttccaatatctgcacgatcttttgaacaagttcattgcgtgtggcctcacagcattctttcaataacttcatatatgcaaggtggcattccgctgctctttttgcattggcgggatttttaggcagcttgaatacatactccgccttgtcagtaagcaaaataggcgacacacccgatgcacggctgcgattcgggataacacgctgttccccccgatcagcctgaataaattcaaaacggtcatcatgtgtaattacaacaaaccattgataacttctccgggcatatccgacaggcggcannnnnnnnnnnnnnnnnnnnnnnnnnnnnnnnnnnnnnnnnnnnnnnnnnnnnnnnnnnnnnnnnnnnnnnnnnnnnnnnnnnnnnnnnnnnnnnnnnnnagatttcaattggagtacccatatttcctatcaattttgcattttcaaaagacaatggtgttgcactgcacagaacgacagtgacattaaaatgttccatcaataggtgcagagcttgaaaaattggcgcaagaacatggatgggcagtttttgaaactcatccaaaatgatgacgctgtttgctaaacggtgaagctttctcactttgcttgtccggtttgaaaataaactctcgaacagttccactgtcgttgtcacgataatcggaaacgagtcccagttttcggctgccagccttgcccgctccattgcctcatctttatcatccgtataacttagctgggaatgctgttccaaaacagatgcttttccgaacacctcttgatacttttgggctgtctggtcaatgatgttcacaaacggcaatgccacaatcacccgttttttgttaaaccgttttgcctgctcaagtgcaaaagctattgaagccagcgttttccccagcccggtcggcaccaccagcgcccggaaaaacaaaggctgttttgccgcttctctgcaagccatatatacttcatttctgtatctatttatctctttatccttgcctttcatccgcaactcaagcatgtagttctgtaattgttcatccagttgatgtatactgaatgcttttccctgccgttttatactcttcccataatcaaagtatcgttcagtatccaggaaatcagcatctaccagtgcagaaaaacacattctcatcagcatttctttgtatgcaaatgaagatttgctatcagatttccctccgagcggcaatcccggaaatcgcttcaatatgtctttaatgatttgcatttccgtttgcgacaaatccggaatcgttttcaaatattgcggagcgtcagggatcttttcatcaaacactgtattcagatccggcattcctgtatgatgccccgctacgattgctgccgccatgatcatccgttcatcctgcaccccccgttgcatgatgtcatgaagtgcaatcgcaccgccaatagcatgttggactgacccgcgaatttttttgtctgcttttaagtattgtacaaacgcaccagactttttccccaagtcatgtgcaatcgcagcaatggccgtgatcccgtatcggtcaaacgtatggctgaaacgccttgcttgaaagtacgtccctttcatatgctcgtccaaataatgtggcttttgattttcagatgtagaaaaatgagcaatgtatctgatttttatcaccttctatgaattggatgttttattaactatcctatctctaagtataataaaaatgttctccgttttcaacaaaatattcgaaaaattatagattctaacgggtgcaatataaaaaacggggaaaaatcacccgttttttacacaaaaaatttacttttatcacaaacccagctgcagattccgcgttctgttcatctacagcaataattaacaaaaacttccaattcatagtttcaatccacgcacttactgagtacagcaaaatataaacaacgcatccatttcgcgttagcgtttataccttatcgtactccccataaatgcgaatacatcggtagtttatcaaagatgattaaaaatttcaaagcatctgtattcaccttccatctttattttattcttgaaaatatgatataaggcaattattccccttaatgggacacatagattcccgtgtacttctttgttataaaaattgggcagtacaaaccctatttggatatagctatacgcccaatcagcatcccgatagatcctcccccccctgctgcctactcaaatagttcatccgccaattttttgatttgggcttttcgttccttcgtcagttgcctgtcaatgcgcggtattccatcttcaacgataatcacgtccccagcttggacaccggatggaagctcactcagacggatatccaccgtcgtccggtcatctttttcacaaacagcaaattccccttcgatccgatcaacaatatatttcatcaaaaacgtcctcctttattgcggggtaaaagaagtgtgggtggtatatgttttcccttttacaacagcttttatatcaatccgcacttcatagccgggagccgctctgctgatccgaaccggaagcggcgtccctgccgtcccctgatagacggtgtccttgcttttgtaatgaaaagttgcctgatatgccgcgcctgtcaaacctgtaaccattaaattgattttaccatactgctgaggcgtttgatcatcaaccttcgcctgtaatgtaccattagaagtggcttgctgatttggaagcccgtacgaattcaccttcgctaccgaaataatggcgtacttcggttttacggcgtccaaaaacgcctggcttgttgcagtctttgaaccgtgatgccccacttttaatacttgggatgaaagatcttggtgcgttgcaatcatatcttcttcagaacggataggggcatctcccgtgaatagaaaagtacctttctccccataggaaagttttacaacagccgaccagtcattcatctcttcatgataatcttttacaggaccgacaaacttcatcgatgccccctgcagcccaagatcaacattcgcttttgcctgcttgattttaagtctgctatttttcacggccagcaaaaaatcttcataggttctggttgtattcacgacccgcggcgcatatacattttttacttttaagttttccagaactgtatccaggcccccgatatgatcggcatccggatgggtggcaatcacatcatccaattggctgacatgcagctggcgaagataccggacaacatcatcacctttgtcattattcccgccatcaattaacacattttctccttttggcgtttggatgagaatgctgtccccttgcccgacgtcaaaaaaataaacctttagttttccttttggaagtgatgcagtacttttatgatggctgtctgtcttgttaacagttttgctgtctgctttactctctgatttttccgtgcttacctgctgaacctgcttttcttttgccggctgactgttagcggattgggtttgaccgcaaccgctgcaaaagagcatgaagaataatagcagaaaccatgcgcccgtccggttaattttcaaattttattctccttctttccatatggactcaaatggtgaaaaaactggagcccctttcaaagtggcaaagacatcattagtttaccatacacaacccgctctagagagaagtccggataaaaaaaccaatttcaaatttgataaggaatttggctgcttttgtcgtatataaataaagatggcatggaatgtaaaaaagcttgcacttggagacgctgtcgtatacaaaaaatttttaaactggattggaggggaaatggcatgccaaactcccggaagcggcccaaattgaaaattcccaagacaaaaagcgaatggttttgggacatcattggctatttatttttccttgggtcgattatttttctggccagcgtttggggaaaacttccggaaaaagtccccggacattatgatgccgccggtagagttgatcgttggggatcaaaatgggaacttttgattttacccggcgtgggggcaatccttgcgctattgatgcaggttttggaaaaattccctcatatttataattatcctgaacgattaaatgcattgaatgcaaaacaattttatgtgcatagccggaaactgctaaatcaattgaaaaatatctgtctgattttctttgccctcatcttattggagtccattgggattgcaatgggatgggataacggttttggtaaatggtttttacccatcataatcattggcatcggaattccgattgtattaggaatcgtgacgcaaaggaaaataaaataacaacaatacgataaaggaagcatgaacgttgaaaaatttcgccatttggaaccaacataaagcacgcttacgttaagaaagtgagaaaaaatgacgcccttccacaacatagaccgcgcctgcattaagaaaacacgaataaacagcatccttccttaacagatcccaagtctcgttaagaaagcgagagatatgagacggcaccctaaatatttttatataatataaatagcaagcggcatgttgaaggagcatcataaatgaaaacaagagaggacgctatccattactgtttaaaactggaaaacacgtatgaagattacccctttaaagataagaattggacattaatgcgccacaaaaaaaataaaaaagtctttgcctggatttttgaaagaaacggccatatttggatcaatgtgaaaggtgaaaacggctggctggacttttatcgccggaaataccacgctgttgttccggcataccatctgaacaaagaacattggaattccgttattcttgacggcaccgtcccggaggaagaaatctgtgatatgataaggcaaagctatcacttaacgaagaaaaaaggaattcagtcaaataggagccggtaaaaatgagaactcgcattacggagatattaaaaataaaataccccattatccaaggaggccttgcttatctcggatatgcggaattagctgctgctgtttccaatgcgggcggcctggggcaaatcactgccgcgacgctgcgaacacctgaaaaacttcgcaatgcaattcacaaagtacgaaaattaaccgggaagcccttcggtgtaaactttgcaatcgcaaggtataacggccggtacgaggagttgcttgaagtggccattgaagaaaaggttccagccatttccatcagtggcggtaacccgcaaccggtcttcgaaaggataaaaggagaaaacattcgtacacttgtgcttgtggctggaacaagacaagcacaaaaagctgaacaattgggtgcagacgcagtgatcgccgtcgggcaggaaggcgggggccatttaggccgggacgacattggcggcatggtgctcattccccgggttgcagacgaagtatccgttcctgtaatcgccggcgggggcattggggacgggcgtggattattggctgcccttgctcttggcgcagaaggaattcaaatggggannnnnnnnnnnnnnnnnnnnnnnnnnnnnnnnnnnnnnnnnnnnnnnnnnnnnnnnnnnnnnnnnnnnnnnnnnnnnnnnnnnnnnnnnnnnnnnnnnnnaatgtattcatgcacacgagaaatatcaacaaacaatcgtgcatgcaaaagaaacggatacagtagtgattaagaaaacattaggggcaccgggccgggtcttgaaaaaccgctttgccttgaatattatggaacgtgaacaggaaggggcatcctacgaaggcctgaaagagatgattagcggtagcgcaaattgcaactatatttatgacgggaatgaagaaaaaggttatgcttgggccggacaggtcgtcggccttattcatacgattccgacagtgcaggaattgtttgacgagatgatgcatactgcagaaaaagggttatcccgattagatcatattatgaaagaacaaacccatagatcatcgtgaagcaacgattgacaaacctgacggggctccctgcccaacactcgtttggttggagaaaaattgacccccctgctaaaaatctgccaaagatccatctttggcagatttctcattttccccattccagagtctcctggatcagaatgttcttcaaattcgataagactctcagctctgagnnnnnnnnnnnnnnnnnnnnnnnnnnnnnnnnnnnnnnnnnnnnnnnnnnnnnnnnnnnnnnnnnnnnnnnnnnnnnnnnnnnnnnnnnnnnnnnnnnnnttttttccattcatctaccccttcgacttcgagtacatacttaccaaaaaaccaattagataatgttccgctcctcccctttatgtgttacgatactcatataaaaagctctccctatggatcgcctgccagctgccataggaagagctgattttcgatttttgttttgtttgnnnnnnnnnnnnnnnnnnnnnnnnnnnnnnnnnnnnnnnnnnnnnnnnnnnnnnnnnnnnnnnnnnnnnnnnnnnnnnnnnnnnnnnnnnnnnnnnnnnnctgtaatcaggataccatgcctattgagcagcatggctgccggtgttactttttcccctaacgagataatgtgctttcggacagtttctgccagttctactgttgttgccgggcggtattccaacgttgggatttttccgagcttttgtgtagcctcagttaaattcggcatatccattcccaaagtcgcaaaaacgaaagattcctttggatgggcatggagcacacagccgatcgattcattctcatgataacaggccatatgcatgtcacttcacggaatgcattcagttgcagaagttcatgctatggtggatttaagtcaatatttttttgttgcagaactctgtactttcattttgcactaaacacagccatgtgtttcccatgggagatttttaagccgattgaacgagaatactacacccttttatatttgcacctaaaaaatgaaagagcacatgatccttctaatgaaatacaaccggcactattttcaataacggaggaagaagacaagtctgcgtcttcattatttcatctcccttccactgggagaaaaccgcatcctttcatgcccttttttcgtgcttttgaactggcctctttacagtatattgaagtgatggtggagagtgtctatttgcaagtgaaatcaaacccgctatttgccaccatgtgtggatttacggagaaaattccgagctaccgttcctttgctcgttttgatcaaatcatgacaacaaatggtctttgggaaaaagcccggctattggttgttgaatataataaaggggaaggcgtggttgaaacgaatgaggaagcagccgccgtggatacatcgcatatagaggcagaagcaaccttgaataaaacaaggaagacgtgttcttgtgagggtaattgcgattgccccagagtccttacggacgacaatgtaggggtaatgcgtaaaagtaatgcagtctcctatattgcgcataaattatcaatggtatgcggggtgaaatccggtttgcctttgacgcgggaagtatttaaaggaaatacacccgatgggaaaacattagaaccggagcctttgccaaaatgctataccccctgaagcagtaggcagtcagacaattaaagatcgtggatttattccactaaagaaaacagatattggtaagaaaattatgataaatataaaaaagaaatggcgagttttgatttcaatggattaattcgcttattaccaacatctaaattttttaatttcggtcagttttagactagttttaatagattaggctactcattcccatggtaaatattgtaaaacggaaaagaatgatttttttttgaaaaaaaaagagccatgaaagccactcctttgctaagatataagtactaccaaatatccaagtatcctaggagtgatttcatgactatttctagtctaacacaaaccagagatttatcaatacaaaaaaatttgattccccacaattggcaagactacgctgatataccctttgtcattccagccgtgtgttttccatgggagatttttaaaccggttgaacgagattactatacccttttatacttgcacttaaaaaatgaaagagcacatgatcattccgatgaaatccagccagcactattttcaatacccgaggaagaagataagtctgcgtctctattatttcatccctctcccgcagggagaaaaccgcatcctttcatgcccttttttcgtgcttttgaactggcccctttacaatatattgaagtgatggttgagagtgtctatttacaagtgaaatcaaacccgctatttgccgccatgtgtggatttacggagaaaattccgagttaccgttcctttgctcgctttgatcaaatcatgacaacaaatgatctttgggaaaaagctcgactattggtggttgaatataataaaggggaaggcgtggttgaaacggttgaggaagcagccgccgtggatacatcacatatagaggcagaagcaacgttgaataaaacaatgaaaacgtgttcttgcgaaggagattgtgattgccctagaatccttacggatgataacgcaggggtgatgcgtaaaagtactgcagtctcctatattgcgcataaattatcaatggtatgcggagtgaaatccggcttgcctttgacacgggaagtattcaaaggaaatacacctgatgggaaaacattagaaacgacattggagacgtttaaggcggagaaccccgaaatggttgagcagttagactttatcttggcagatggaatctaccaaacgccggaaaatcaaaaagtgacaaaggacgtattacaggcgaaattggtgtcacccatcaacccacggagtcgtaaagataaaccaactgccgcccggggaattgaaaaaatcaatcggtacggcatccccgtctgtatcagtgaacataaaatggaacttagaggatctgatttggaaaaggggcaatatatttacacttgtcctgtatttcatccaaatgccaagcaaaaaggactcacctgccctctggcgaatcacgtggaatgttgtaatggagcagcacaaggaagagtatttcggatggactttgatcaaacgcctcaagtagacgtcgagttgccccaacatgggcggaaatttaaagtgttatatagtgccagaacgatcatcgaacgaatctttggcattctaaaagacggatacagtctccgtcgtgttcacaagcgtggaaaacaggcagttgaagcgcatgtagatcgatgtatgatatctatgcatatcatggcaaatatggcgtaccatcaaacaggaaaggccaattgtggatggacacgccatcgactacaaagagcaaattaagttattcacaggtggatatgtgaataagtccaatgaagcgtctcctttccacaaagggcattgaaaaacccattttgtgaaggcaggatacgtatgcccttttttggagaaaaaaatgcccattttatttctgctgaatttgaaaacctggaagaaaagaaaaaaacaggatcattaattctctagagcctcgttcaagggtaattttttattttggcagaggctctttaataatccagcaattattgatataatatccnnnnnnnnnnnnnnnnnnnnnnnnnnnnnnnnnnnnnnnnnnnnnnnnnnnnnnnnnnnnnnnnnnnnnnnnnnnnnnnnnnnnnnnnnnnnnnnnnnnngtttgatctacttctttgcgaatatggccatagctttttttaagatttcgttttcctctttcagccggtgcaattctttttgcaggttcagaaattcttccggggtaaaagagctcccgtcatccagcttaaccggtttttgttttctgatccatttgtagattgtcgtttcagacaggccatattcgctgcagatctgttttactggtgttccagtttgataaagctcaaccaccatttccttaaattcagcatgataacttttacgtttttcgcttgtgttacccatatccggacacatcccttcgttaatattatatttcactaaagggtgtccatgaaactatactagcatcaatggtgaatcaataaggctaacggctagacacatcgccaagaatacccatcttccggctcaatccagaaacaccatttcctagtaatgtatacgggaaacgattatacagagtaagctgtttttaaacaagcacatgtactgattcaacattttcgccattttttacgaaaaaaccgttcgccaaacatccggtaactgaaatacttacctttgattgcggccttgccatagggctcactttttcaatccttgcttcataaacgaaatgttcctccatcatctcatacataaagccactatagaaagccggaatatatcctaatttatcttcaccgttattagacaaaacgattacagctttctcatcctccttgtttgaaggctccaattgaaaacgcacagccgcaccttctttcaactgattaatgactttttctccgtcatagtagcgccaccccgcgatataaaagtcaaaattgaaccggtcttcaaaaacactaatgggggcaacaaattcatacggatcagtagccagccgtccaccagtagcccgcaataaatccatttctgtataatccggaggcagcccataattttttaaaatcttatcaaaatccggtctccttttatccggtaaccgccgttcaaatggtccaaataagcgatcagaaatgtatgtcttattgagattacgaaatgacaggtgcggtttatatccattttccaaagcttcttttaaggttctgcgcttcccgctcaactcatatgaaaaaatgtattttccatcttcatgaaataaattgccaatatgatagcgctgccttgtcttctgattttgccagatcagccataagacacatggatttttttgcattcaagcacctcctttgtaccagttcaagagccattctttacgatagaggagtaacttttttacccactttttgtatacaggtcccatcactttttccggtatggggtctacgatttcctgaagcatctgcaagtttattttatttaatgaatttatcgattctttggtctctaaaggataatattgtttgatcactgttaataaatcaagaaagcgcggcttctttttttcaggcaagcctatcaaggaataactacgattgctaaaagctttaaacatattgcaatctttgtccattagacggattctgttttctttcaattgaaatcctagagaagcgccattatcataaacaggggcgattctatactcattattatcatatataattccccaattgtcacaatgtctatcctgatttccaattaaggcgtcaaatacaataattccaatgaaatcacggttcaatttaaattctgacagaacacgcataatattaaaaaagtggtaatgcttaagactatatctgtcaaaatcctctgcgatattgaaaaataaatctccaccttcaaatagctcttcttgtttgcttataaaatttttcgccagtgtggcaacttttccatttttcttagccagttgcacatccattgtggagaggccgattgctctccccacgtcagatgctactttctccgcccaagcttctcccgtgttttccttgggaattttcaatagaaaatgttggccagtctccggatgaactaaccaatatttctctcttgttcctgaaacctgccttttttcatctactttccaatttgtaacatccattaagcacatcgtttcaccttttaggaatctttattccattataattgaacaagatgcagttgtcagccaatgaacttatttttagtcatttacgttcggcccccaaccaacttcatcacaaccttatagagcgcttacatttaagctgtgatgaagatccgaaaccattaaccttgtgaaggaagcatagatctgcagacttgaaaacaaaaaaatagcggcgttatgccgctattttttcttaaaaggacaacttgaacaaatcaccaggccagtttcttgctccccagttttctatggaaatccttgtcttttggcgtacttgggtcgatcccttttaactgcgggacatacgcacagatcagttgaaccgggatgatgtattcataagttttataaaatgggggattcactttattgctgaagggagtggaaccctgttgcccattccctcaaaaacatactttacattcgacacaaaccttcaaatttcctccttcatttttcaggccatctccggatacaaaatccccccttcgaagaggtgtccagcgttgctcaaaggttttttccttaaatgaaaaaaacattagaattttatgtgaaacccgcaaaaatgatatagaatattcccccatcatgtagtagtattttactgttacaacaacatttttaaaggggggaatacgttggaaaagaaattttttagcagattgtcaatattgatgttgtctttgttactggttgccggctcgatcagttattttcctaaatctgccaaggcttatacatccggcacatcgctcgataaccgcgtgattttccaaagttttagcctgtacatgccatatgaaagcaatatgtacaaaattctttcagcgaaaggcaacgaattgaaagattgggggattacggatatatggcttccgccggcttaccgttctttcaatgcggcacgttacatggaaggctacgccattgccgaccgttatgacctcggtgaatttaaccaggggccgaataacactcggccgaccaaatacggaacaagcgatgaattgaaaagtatggtttccgtgcttcacgcaaatggtttaaaagtacaggaagaccttgtgcccaaccaggttctcggattgagcaaaagggaagcagtttacgtcacacgcgtagatcaagacggaaatttgtttaaaaatccttatacaacaggacttgcaacgcaaatcagggccaacctttatctcgcttacacaaaaggtggcggcgaaggacaggcaaaatatggctatatcaaagaatggaacaaaaaatattttaacggtacctccttacaagggcagggtatggatcgcgtgatgaaagacagcgagggcaatccgtaccgttattttgggccaaacaacccgaaaaactacttgccaagctggcttgatgaagctgcagcagcaaataaaatcaatacagttgatacttatttgccagtagacggctggtatgctgcaaaagacgcttcgacttcggataattattggaaaccgatgttaatgcatgaccctggctatttaaagtacatgaaaagccatggctattcatctgttgacgatatactgaacggcgacaacgggcaaatcgcaagtttaacagatgcgtatattgcatcccagcccgggtacggcttcggatcggaagaaaggtcgtttaaaaatgatgattccggatcagatgaccaggatcaatttttatttgtgaaaaagaatgggacaactgttcacaacctttacaacacgatcagcgggcataaccagtttctggtaggaatggacatagacaacgggaatccaactgtccaaaaagaacagatccactggatgaactggctacttgatacgtatcagtttgacggcttcagaattgatgcggcaggccattacgataagcaagtgctgctggatgaaggtgacgttatgaaacagcattttggcagccatttaaacgaccatttaagctatattgagagttatcaaagtgccgggacagattttgaaaataaaaacgggaatccgcagttaatgatggattatgccctgttctattctttgcaaaatgctttgggcaaaaattcgccatcaaacagcctgtcaaccattgctacaaacgctgttgtcaacagggcaagcgcaggcacggcgaatccaacgcctaactggtcatttgtgaataatcatgaccaggaaaagaaccgtgtgaataaaatcatgatggacctgtacggcattaagccgggtatacattacggcacatccgcaccgaaatctttccaagatctgtatgataaaaagacagaggcaaaagctttggatatttatgaaaaagacatggaaagaacggtaaaaacatatgcgccatacaatgtgccgagccagtacgcatatattttgacgaataaagataccgtcccgactgtcttttacggcgacttgtacaaaacgaatgcttcttacatgagcgagcatacgccgtattatgatacgattgtgaaattgttgaaagtgcgcaaaaattatgcctatgggaaccagcaagtaaccaactataagtcgaacacttccggcacggcgggaaaagatctaatctcaagcgtccgctatggaaaagaccggaataccggcgtggcaaccgtaatcggaaataacccgaaaaccgatacgactattaaagtggacatgggtacccggcatgccaaccagctatttgaggatgcaaccggatttcataacgaaaagctgtccacagatagcaaaggcattttaaccgttcatgtaaaagggacgcaaaatccccgggtaaaagggtatcttggcgtctggatcccctcaaaaaaagcggcaacgccgaaacaaggccctgcacttcaatacggtaagtatgtaacggtaacaaacaagcactatgccgtatatcaagacttcaactggaaaaagaaaaatgtcactgcagtgaataaaacgtatcttgccaaggtccaataccatcacagcaacggatcaacttacctgtccctttatgacgggaaaggcaaatgggtaggctatatcaacgccaaagctgtgaaaacaggaagcggcaagcaaggcgctgccatacaatacggtaagtatgtaacggtaacaaacaagcactatgccgtatatcaagacttcaactggaaaaagaaaaatgtcactgcagtgaataaaacgtatcttgccaaggtccaataccatcacagcaacggatccacttacctgtccctttatgacggcaaaggcaaatgggtaggctatatcaacgccaaagctgtgaaaacaggaagcggcaagcaaggcgctgccatacaatacggcaaacatgtcaaagtcaccagcaagaactacgccgtatatcaaaacttcaactggcagaagaaaaatatccgggccgtaaacaaaacatacttggcgaagtacattttttaccacataaatgggttaagctacctgtccctttatgacaacaaaggcaaatggataggttacatcaatgccaaggcggttaaaagcaaataaatttctttaaacaaaaagcgtccccataaccggcaacggggtggggatgcttttttctgctcactgcaaatcagaaagaagggcaccttcaaggtaggttttatttaaaattcggggttttctttgattgtttcgagtccctcctgctcattcatcgcccattcctccagttcagggaaacattaatgtctccgggttatcagggacattttggactccaaattgcaaatcatatttttcagaatggatggatggaaaccctgctttctgaaaaagctgtacccactgttcctcggttaaaatttgggatacgccataaaaatctttgatgtgtgccagtttttgctgcgaaacaggttgttccaaaaccatttcaatcgcaattaaacatccgccgggcttcagcacccgccgaaattcctgaaccgttgtgggcatatcggtaaaaacgatcaccgactctgacaataccaaatcaaattgcctgtctgcaaacgggagagcctctgtattcccatgcacaatttgtaccggcaaacctaatgtccggactcttttcctggctttttccaccatcaattgatgatgatccagccctgtcacttggcacccatactgctacgcaacgtatgcagcagtatggccggtgccgcagcccgcatcaagcaccgttgttttttccctatatgttcagccgataatatatcctgtgtcagcttgaaaccgcctggatgcgctccgccgactcccagttctgccaaaccattcaggtaagtatattcctgatccactctaacccctcccttgccatccaaacagttggctcgttgatataccgtatgtaccattgcagaaatcggtaacctttatcgtgtgaactacccaccacttatcggaaagccgttaaaaacatactttggttaagaaaaagcaatggaggaaggcatatgagcgttgttaaaacggacaagtggctgcgccaattatatcaccggccggcagcgatttgtgaaaaattcaaagcgcattttaaaggcgcaagtgctgcggaaatttatgactatctggcctatcatggcatgtaccagcctgaaaataacggagccgcgattgtccggcaattgcaaaaccttcatgtttgggaaatcgcaaaaaatgaatttctctgctgcaaaaaagaatgggatgggccggatgtcccgatttatatttttccgtccgactccgccaacttactgattcaaaatgaatttaacggaaaagcaggattagcctttaaagatcaattatttttattcgtttctccccggaacagtgaaacggaaatcaggtcattatttatccacgaatataaccatgtttgtcggcttacaaaatacccgaaagaggaggccgattatgttttattggatacgattattttagaagggctagcagaaaatgcagtcagggaaaaattcgggcacaaatacgtttcatcctgggccttttcttattccaatgacgaaatggagaaaatatggagacaatacgtgtacccgcacagagacattcaaaaaacaaaacagcaacatcaggagattttgtacggctcccgtgtttacccgaaaatgtccggttattgcgccggatactacctcgtcaagcaatatcttgaaaaaaccggcctctccgtaaaagatgtgctcaaaaccgatgcaaaggttttggcacaaatcgattccatgtaagttttacccgataaccgcatccctgaacatgtggttatctccaaagtacaaatcgatttcaagtcattttcatccctgcacctgggtttcaaaatcccgcacgataattccacaaaaagcctgatcgttttgtccaccgtatccgccggcaaaaatcatatactgtacaattcctaaaggattggaggatatttttatgtcatatcgtcacttccatgcactatgccatcgatacaggggcagagcggtccaaatccggacggttgatggacggatccatagaggcattattcatcatgtgagcggaaacagagtgttccttcggccgcttggaggcccccgcaatcttggcggatttggctacggaggctggggttggggatggggatttggctggggcattgccatcggttcaatcgctgctttggctttaattcctttcttcttctggtaagaagtttttgcggcatttttagaagcagataggactggcgcagcccggccggtgataatcgggttcagccatgtacggatttacagaaagcgccctccccttatggagaatttcacatagtatgttatggctatttcgaaaggaggttaaaaagatgtctgatggaggcgtttacagtggcggtttcgctttagtcgtcgtattgtttatcctgttgatcatcatcggtgcctcatatgtcggcggttacggcggcggttatggcggatatgggggctacggcgggtatttttggtaagccatgcaatgaagtaaggttctccggcatttaatgcctgttttccatgcccccctcacatgctcgaaagttgcacggaaaaagggaatgctgccttatacagctttatcatgagagccggaacaaaaccggagtacgcattgtgctcccggttttgtttttagggttttcttatcattaaaatgcccattaaatgattgggtggacaagccggccgtttttgcaatcctcgctgtccctgtttccattaataccgattcatcaacgattcagctatctaatcacgaagccggcatccgctggacatccaaatcaaattgcgataacgccatgcttagcatgatcatgagttaaggatcgctttttcgcctccgcaccaatctataaatcttgcggcaaaattcggtctgtccccccctaccgaaacattcaggcgaaattaagaaaaatttaaaagaagccctctagactaagtttctgtaataaaccccaaagacacagggtggatttcctggaaggtctgaatccaaaagtaaaaagattgtgaagttgttacaaaaaggtgcatcaacatacacttgggtcgctgcaacggtaagtgcgcatctccggcgacttatcagcttgcaacagatcaacccgtgatggacatcggcggttttacaggaagtgacccggccccgaccctttccgcgtttaaaaaatatgtccggcaagggaagatccactactttatcaataatggaagaggctccttcggcaatatgaaacaaatgggcaaaaccttgcaagatggcaatacaaatggcaaaaaggttgaaaacaatgccccaaatggcgccatgggcagaggttccaatacaagctcatcgatcaccagttggggtcaaaagaactttaaatcaaaaacagttgatggcgttaccctttatgatttgacacagccaaaatcgaagtaagctctatcgtgaagactatccaaaaagttacagacggtgaacgctgtcattcattgcgttcaccgtcttttagtctaatgactggctaatgatcactgatgcattcttgtttttcttaatggggtttcttccaattcaacgctgggaggatgattcccggcatttgccaaaagagattttttcacactttgcgactttcggtttattttttcaatgaaattggcctgtcccccttaaaaaataccaaaaaaagacgataattttactagacggatttgacaggatttagggtattttgatagaacaagggccaaaagaatgaaattttaaatttcaggaaccctggagctggcgaaagatccaattggaaaggagattgaaatgaaaaaaggcttagtcataccactttgttttgcagtattatccactcctgcttttgataaaacggtacagggcgtttcactgacaaaaatcctacatagttcaagtgtacaagccgcagcaaaaacagagacaaaatatgtcaatgttgatacgaattcgagcttgacattaagagcaaagccttcaaaaagtgctgccaaattagacagcctaaaaaaaggcacagctgtattggtgtacaatgtgtctgatggttgggcagaagtaaaagccgggacaaaaacggggtatgttcgtgcggaatatttaaccagcacaaaacccggcagtacggcaacgacaacgagcacagccaaaacaacgacgaagtatgtcaacgtggacaaaggctctcatttaatcttacgttcgaaagcctacaaaacggccagcattttagcaagtgatgctagtatagttttttttggcgaattcaaatcccgatagccatgcaggcacttcaaccccagtccaaacaacgacgaaatatgtcaatgtggacaaaggttcccatctggttttgcgttccaaagcttccagaagtggcaaaatattaacaagtctgcaaagaggcgaaaaagtgacggtttatacagcttccggcccgtgggtaaaagtgaaagcgagaggtataaccggttatgtgctcgcatcctatctgtcagatgcagaccctgatgcaagcacagcagatgacggcaataatagttccgaaccaactccagacgctacggtaactaaatacacgacagcagatttgaatttacgtaaagggccttctaccttaacaagtgtgattgaagtccttgataaaggaacagctgtaaaggtctactccgaagaggatggctgggcaaaagtagaaatcagtgggaaaattggttatgtcagcacaaattatttaacatccgctgcgcaacaatccaatggcaaagtgacatcgattgtaaaaaaatatgatctttcactggatgaacttgcaaatattcaaatgagagtttcgcctcaaacagatacaaataaccgttatatcagaagtgatgccattaagctgacaagccatacaacaggtgttgtccaaaacggaagctggcatatcagagatggtgcaggtacaaagaatcatgaagtcggtgaaacgcttaaagaaggcacaaaggtcaccatcctatccaccgtaaaaggggatgacggctatacatggtatcaaatcagttataacaaggcatggaaaaatgccacgaaaaatgaagtgaaatactatttaaatccgaataactttgtttcggatccagtccgctcacttcaatttttgaaattaacttcgaccgccaatctgaatgcaacagaagtgaaccaaaaaattcttgcgggtaaaggcattttagccgggaaagcatctgcatttttaactgcagcaaaacaaaatgggatcaatgaaatttatctgattgctcatgccttacttgaaacaggaaatggcacttcccagctggcaaatggcgtcaagtataatggcaagactgtttataatatgtatgggactggggcgaatgatggcaatgccgtccaaaatggagccaggtatgcctatcaacatggttggacgaccccggaagcggccatcattggcggagctaaatttatcagcagtaattaccttggcgccggtcaagataccttgtataaaatgagatggaatccagatgtcgctgcaacatatggctatgcctcccatcaatatgcaacagacattggctgggcttacaaacaagtggatgaaatctataacttatacaacctattagacaattacaatatcacattggaagttccaagttatcagtaactgcctgcagccattaagctgttcataaggttttacgaatgaatgactttcaggaccttgtaaagagcatggctaatgataaaagcttctccttttttgagaagccgctgaataagtgcaaaagaaaacataaaaacggcgagacaccagcattcatagtgtctcaccgtttttttttggcctatatcttgtatagataaaaataaaacatcactttttcagtgcccttttccagcattgccgtcaacggcctatgatgggttttccttcaaataaaacatacccgtttatttttcatttttgtttctctctattaaaaaatctaaaagtttatcaatttttgatcctatttcttcaacaaccaaatcattacgctcatctcgagccatgatttctcccctaagtcatcgttctctcgctgaagaatatctatgattttttctgcttcttttaattgtttttttaattgtctaatttctttaagagttctttcctatcttcatccaatcagcattcctccctccttatggaagtaatgaaaagtttaatccatttccaatgttaacttatcagaaatggattctaaaaagagattaatgaaatattttccatttcccaaaggataaaaaatacgacctggctcttattcacctcattttcttctcagatttaattggggcatgtgatctgctcctatcgcgattcatttatcattcattgtcggccgttgttttctcattgcgcacatttattagatgccgggcctgggcccctctttttcccacctccaacaaagcattttcaccctgacctctggcggaaacaaatcggaaataaaaaaagcggtacagaaaacgatttctattttctataccgccgttctcgtcattttacgatgatcccgttgataaagctgatgatgccctcttccacttcatcccggatatcccggtcattgtgaatttcatgccggtgtccgggataaacttttgtttttacgtgatgtccggtttgaacaagccagttcgatacagcatataccccttccccatattgtcccactggatcctggtcaccggcaatgttataaataggaatcgataccggcaccttttctgcccactccgttccgacaattatctccatcatttggacaaaatagtagagtgagcgtatatttggtggagttgtaaaattattaaacggatcgtttgcgtggtctgccacaatatccgggtcggaacttatccagtcgtttggcgttttcggttgctcaatccgttccgtcatccagcccatcagttcttccaaataagaaagatcggtttcttgccccttgccttcatagatcaggttcttcaaaacagggagcagtttgcttgcattcgggaacctgcctgaagtcccgcacagaattaaaccggacaagccagccccatgggtagcagcataacccctggcaatcatggaccccatactgtgcccaaacatgaaataaggcaaatcaggatattgttcctgtacaatctttcgaagcgtatgctcgtcctccgccatcgtcatataacctttatctccccagtctccccagttgccggaatcatacgctgtctttccatggccgacatgatcatctgcagcaacgacaaaaccagcctcattaaactttaaaatcatatgtaaataccgccgtgaatgttcaccaaaaccgtggacgacctggacaatcccgcgcggtttacggatcggtgtgtaaatccaagcttttacgttgtcttttccgttaaatgattgaaaactcaactcttgaaaagccaaaccaacccctcctttgctcatctcattaaatttctttttatcaagctttaaaaatattagcaacataatactgggtttgacttgcaaaattttttggtctaaatttccattttcctaactctaataatatacaccggctgattttcatttttctgttgatgcagcgcgttcactacgacatgggcatctaataaaacctttatgtcttttgcttcaaaaaaatcatttccatttaaacaatcttcaatcgtgcttataaaaattaatatttgctcaaaatgaaaggatacccccgagcctctggcataattgaaaaaaacatgaaaattcttctttcccgtacttttaccgggttgctgaacgaatccgattttccagcataacctgccccacctttacagaatcatgcacttatgaaaatgcatgattcagctgctctatatattggttcagctttcaggaagagtgatcagaatccttgccaaattcaggtatttagccaaatgaccgagcccttcattaaaatgttttccctatttcaaccgcctttttgatagcttccttcataatatcttcagcccgttcaggaaagtggtccattccctcaacaaataattgttgaaaatctttaaagcccaagaaagtgaataacgtttttacatattggcttgcagggtcacttccgttgtagacacttccgcttgattgaatgtgcagtgctttttttccttccaataaaccaacagatccctggtcagtgtacttgaaagttttccctgccactgtaatggtatcaatccatgcttttaaacgggtgggcacgcttaaattccacaaaggattggcaatgacaactttatccttttccaaaaaactcgcagtaaaagaatcaaacaacgtcactttgtgttgctgttcaatggataatgcgtaaaaaggaaccctttgttttaactggttccacgcttccaacaggtcccggtcaatttcaggaatggtgatatcatacaaattgatttcttctatttcatcgtctggatgatgctcccgataagactttaaaaaagcattcgtcactttcattgttcgcgaatattcttcggaaaacggatgggcttttacaaccaatacttttgacatttttgaggctcctttacatgttttactattattttatgagtaatcgccttcaaattcaatcaatttatttatttcatccacgcactcacacggaggacgacataaatgccttttccaattgaatccttgttctgttggcaactgccggcaaaatcgggcgctgacagacatcccaaaaaatgccggccccgcttttaaaaaatatacggagccggcattttttatggttttaatacgacttttatgcagccatctttatgatcattgaacaattgataggcctcgcttgctttatctagcgaaattttatgggttatgatttcagttgggtcaaactttttctctgtaatgtcttgaaagagtttcggcatcagatgtacagccggcgcctgtcccattttcagggtgatattgcgttcgaacagcctgccaagcgggaatgcattgtaaaccgaaccgtatacccctgtcagctggatagtgccaaacttcctgaccgcttccatcgcaatttgaatcgcgctgattgtgccgccctgcaacttgagtttttgctcgatcttttcaaccgcggatttttttccgtccatgccgacgcaatcgatcaccacatcagccccgccattggtaatctcacgtaaatactttcccatttcattgtattctttaaaattatacacttcgactctattcattttttgggcatgctttaaccggtagggcacatggtcaactgcaatcaccctgctggcaccgttcagccatgcaaatttctgggtcatcaagccgatcggcccgcagccgagcacaacgaccgtgtctccctgcttcacaccggcattttcaacactccagtatgccgttggaagcacatccgacaagaatagcagtgcctcatcctccaactcgcaagattcaggaatcacaaacggcatttgattgccgaacggtacacgcaggtactcagcctgcccgcccggaatatctccgtaccgctctgtgtaaccaaataaaccgcctgtgtcgacctcttcattcggattcgagttgtcacactgggactccatcccgtgctggcagtaatagcaatgcccgcacgaaaccgtaaacggcagcacaacccggtcgccttttttcacttttgtcacttccgggccgacctcttcaacgattcccatcggctcatgcccgatcacaaatcccgggcgcgccggcaaagctccgttataaatatgcaaatcagatccgcaaatggccgttgaggtaatcctgactaaaatatcatcccgcttttttaatgacggatcatcaacttcttttacctgtatgtctttcgcaccttgaaatgtaactgccttcactgccataacctcccttatatacagacctatacccatgttttttcattcttatgtatataaagagatttttttcaatttggaggcggattcccggttgtgccgggttttccgtaaccgttcttggaatatacgccatcgtttgccatccaatgttgagtctgtttaagtagtggcaggacctaagtttttgtataggaggcccaagcatattccttccattgtatttaatgcctgcaaaactttgattctattattaaaggagtttatttttaatgaatgatttacttgggacagacattggaacttcaggaacaaagacagtgctgatggatacagaaggccatctgattgcccaggacttgcaagaatatgacattatcacccccaggcctttatgggcggagcagtggccggatgtttggctagacgcagccaaagcctctatccgcaacacggtgcaaaaatccggcatttcaaaagaaaagattgccgggattgcaatcagcgggctttacggaggttccggcataccgctggatgaaaacatgaaacctgcaaggccttgcatgatctggatggacaggagagctgatgaagaaacgaaatgggtgctcgagcatatcggggaagaaaacttgcaggaaatcacttataacggggcagatccatattacggctacacaaaaattttatggatgaagcgccatgaaccggaaaactggaaaaaaacgaaactctttcttccgcctaacgattacgtcatctatcatttgactggtgaaattgcgattgactattcctcagcaggcaatattggcggaatctttgacatgaatacaaggacatggtccaaaacattaatggatcaaatgggaattcccatgtcgatgatgccgcaaaggattgtagagtcaacggatatcgttggcggattgacgaaaaaagcagcagaagaactggggctttctgaaggtatgcccgtcattgccggcggaatcgactgcggcgctgcaaacatcgggctgggggtattggaatccggcatttacgccgcttctatcggcacttcgatgtgtgctgcacttatctccgaccagcctgcgaaaggaaaaggtttgattgtctggccttatttatatgacgccaaacgattatcgtattgtttcgcaggagccaatacggcaggcgcgattgtcaaatggttcaagcaaaccctgtgccagtttgaattggaagcagagaaacatggcggcagtaatgcttatgatattttaaatgaacaggcatcgaaaattcctgccggcagtaatggccttatcgtccttccgtattttatgggggaaagagccccaatatgggattcagatgccaagggcacaattattgggctctcgcttgcccatacaaaagcacatctttatcgtgcattcttagaggcagttgcctattctttaagaaatgccatggaagcaaccggtgaaaatgtggggaattccatctacattgccggcggggtaacaaaatctaaagtctggcggcaaatttttgcggacgtaaccggctaccctgtcatttgcccgctccatgatgttgaagccaatatgggggatgtaattcttgccggaatcggaacaggacttttaagttacgaagacgcaaaaaaatggcaggtgttagatgaaaagatcctgccaaatccggaaaaccatgaaaaatataatgcctgctatcaagtttatcaatctgcctatcaacatttaaaacaagatatgaaagcgatatcccgccttgttgaatcaccaacaagatagacagagcggacatgatttgcttattggctggttttccagcctcgccatcatgtccagttgtggcgccattacgatacagcggcccaacggaaattcaaaaaaggggatgtgagttaaatggagaaatggaaaaaaagaatggggtatggtgtaggagatttaggttgtaaccttgtgttcgggacaatggcatcttatctgatgtttttctatacggacgtctttggcattacagcagccgctgccggcacattaatgctcgtcacgaaaatcatcgatgcatttgcagataccggaatgggattgatcgttgaccggacccatacgagatggggccaggggagaccttattttatcatcggagctgttccttttactgtttttaccatccttacgtttatcgtgccggataccggaatgactggaaaattggtctgggcctatgtgacattcactttgctgaatatcgcatataccgttgtcaatattccgttaaacacgatcgttccaagactgacttcagacgtgcatgaacgaaactggcttgtaacaaccagaatgatttgcgctttattgggaacagcattggtgatgtccattacaacaccacttgtaaacctgttcgggcaaggaagcacacaaaaaggttttctcattacgatgtcgttatatgctgttctcgccttattgatatttgtgattacctttatgaacacagaagaagtcgtgcccccggctgtcaaacaggaaaaacattcgtttttggaggatttaaaaggattaaccggccagagcatcctgttctttatcttaaactttctttactttgcattatttgtaatccggaataccacggtcatctattatttcacctataatttgggacgttccgggtggttaacttttgtagggcttttcggtattttgtccggtttgcctatgctgctcgttcttccatttttacaaaaaaattatcaaaaagggcttgcttgctgttaagcacagcgatttacattattggcgatttgatgatctattttggaagcgcattcccagttgtactgattgccgggttagccgtaacgggtctcggcatatacggcatttttgggacaacatttgccatccaaccagatgtcatcgactactcggagtatcagaaaaaaagaagcatatctggtatgattgctgcttttcagggctttagtgtgaaattaagcatggggctggcaagcgcgctgatcgggatattcttaaaaatgggcggctatgtcccgaacgcaacgcagaccccgactgctttaaaatatattgaagcttcatttatatggattcccatgttgatctgcctgcttatcggcatcaccacctgtttctataaactggaccaacaacgggaaaaaatgagtatcgaactggaacgccgccgtcaaatctttaactctcaatcggcagaaacagtatgacccggtttttcttctatatccccctcattttcaaaggggggatattttcaagcggtgacagggcacaagaccacgcatattgatttatatgtactggggcggcccccattatcggaggccgcttcgccctagttcgccttcacttattcatttacacaaaatattttacattctcttagacttagcaaaaacttgaagggctttagtaaatattcaatgcaagggttatatagaaaatactaaaagaactttgcatttgaaagctgattgaatgcataaagaataaccaagtattttcgccgatgtattcttttatatattaaggcagagcttgctgacaaatgggatgtaagccaacatcagatccgttcagcaaaccctagttcatgaatcggacagttcattcaatcttgcatttaaagcatttagctttctttggcgcttaggttcgttatcttcagcattagctactttaaagagttgcctcacttcctttttggttgcaactttgtgttgtacgcaaaaaaaacaaaaatcttcaagtgtatcttgtataatgagctcgggggtatcgtgttcactggctgctgtgcatatttcttcatcatggataatttctcgtatctcataatcattgctgcaaatgattctagcttgcaataacattgcagcagccaatgtgtgaatttcaccaagattgcttgtgcttttaagtatcattccaagatttctctttttttcataaagcctcttaaagctctctccaatatatcgttcatagtaacgatatatttcaaattcatcgtgagaaagacattgtacatcatccggatcaaaaagttgccacctttgttcatgaatttgtttttccgccactgatctgttcaataggagttcattcaaaactgagatatggatgtatacatcctcgtaaagctgattaatccacccgatgacatcgctttttttataaacagccgcgagttgaataatattggtatcaataaagactttccctcttctcacaaatcttcttcctcttcctgtgagatcgtgcgttcacgatttgtttccgtttgataccttatcgccgtttccggagagatttgagccaattttccagatgcttctgctttatttaataatcttttttcaacagcttcagcgataacgctttcatatttgctaaagcttttaatgggaaaaggctcatcaagcgggctgtttgcgagatggtgtgctttacgaagtgaaatccactctttttcttttattgctatcaagcggcgggattttgataactttaattcgagtatccgtcttgccacagcttcgtatggtgctgcggccatgtcagcaatcatgatgatcgctttttcttctccaaagtcctgtttcagtcttccccatagcagacggacaagcgaggcaggcatcattaccgctgcagcaaaccggtcagctgctctttcatggtcaatttcttcactaatgacttctttgtatcctaataaatgccaaaattcatgtgcaactgtaaaatatcttatgcgtaaaggctgccgggtattgatggccacaaaaacttgttccgaatcaacatttacagtagcgccgaaatattcgttgtccggcacatcttgaaaaataacatgtgatatttcttgaagttttaactcaatccccgggccgataaatatttcggcgccaaaatgatcagttaaaaattgcccggcgaaagcttcaccaacttgttccgactgtaacttcagcttactcatatggtttctccccagtagcacgattgatctcctcaatccgtaaacaatcttcaattgcaaataacatattttccaactggcgtttggcagccctcgaattggctttcccgcgtaaagaaagtacataaggtttttctgaacgatcttcagctaacaattcttcaacggtaatccccataacttttgcgacttgagccattctgtttggaagaaattgccgttttcctgttaaaatatgtcccattaaggatttactgattcctacttcctcagcaagatcttgaatggattttccttctgtgtcaagccaatctctcacttttttgattgccgcttcattggctttattcatgaattacactccctcaattattcctatatctttattatatacaaaaccacgcaaaaagtgtagacgtctacaaaagttgcagcatagtatctcccttgtttgggataccttatacgaatacactattcattgcatttggtaataattgaccaatatccccagcttaaaacaccagctgaaggcgatggaattttcacctaaaacgatctatcattccaggatatggagaaacggccccctacctggaggccgtttcatcttacttcacttttacatatctgtatttgcttttattccctgccttgtcttttgcataaatcttcagcgtggatcctcttttttgtttcttcatatgcaccgagtaggttccttttgaatttgccgttgcttttccgacgtaatggctaccgttgtaaacataaaccgtcgcgtatttttccgccttaccgaaaaccgttgttgatttgtaagtgacctttccggctgttggaatgccaggggcggttttatctacaaccttaaacgatttgcctgcacttgtatttctcgatttatccgtcgcgtaggctgtcagagtcgttcctgccttttgcttcgatttgatcctgattgagaaggtgcctttactgtttgctgtccctgtccccagcaccgttttaccacgtttaatcgtcactttggcgccggcttctgctttacctgtaatcgttgtttgattatcaccaaaccgattgacggacggggccgatggtgctgttttgtcttccactttgaaggatttgcctgcacccgtatttcccgctttatctgtcgcataggctgttagaaccgttcctgctttttgcttcgatttaatcctgaccgagtaggtgcctttgctgtttgcggtccctgtccccagcacagttttgccacgtttaatcgtcactttggcgccggcttctgctttaccggtaatcgttaattgattatcgccaaacggattaacggtcggagctgccggagccgttttatcaatgaccgttaccaatgtttcaacactcttgttccttgccgcatcttccgcataaacgacaagcttcgttcctgctttttgttttgcaatggttaccttaaatgcaccggtatgatcagccgttgccgtacccaaaatgtttgagccggatttcacagtaacttttgcccctgcttctgtggttcctgtaaccacagtacttgtatcgcttacttctccgactttcggcgctgccggagccgttttatcaataaccgttactgttgtttcaccgctcttgttccctgccgcatcttccgcataaacgacaagcttcgttcctgctttttgttttgcaatggttaccttaaatgcaccggtactatcggctgttgccgtgcctaaaatgttcgagccagattttactgttactttcgcgcccgcttctgtggttcctgtaaccacagtacttgtatcgcttacttctccgactttcggcgctgccggagccgttttatcaataaccgttactgttgtttcaccgctcttgttccctgccgcatcttccgcataaacgacaagcttcgttcctgcttttnnnnnnnnnnnnnnnnnnnnnnnnnnnnnnnnnnnnnnnnnnnnnnnnnnnnnnnnnnnnnnnnnnnnnnnnnnnnnnnnnnnnnnnnnnnnnnnnnnnnccggtatgatcagccgttgctgtccctaaaatgttcgatccggatttcactgttactttcgcgcccgcttccgtggttcctgtaaccgcagtacttgtatcgcttacttctccgactgtcggtactgccggagccgttttgtcctgaacagtgacgacggtttcttcactctgattgcccttactgtcttctgtatgcacatgcagttctgttccggctttttgtttagggatgctgaccgaaaaacttccatttgaatcagtagaattggaaccaatttcctttccgctcaccgctactttcacagtcacattcgggtcggccgtaccggtaaccactgtgtcattatcccccaccgtttgaacggacggttttgacagagacgttacagcgcctgcatcacctttttcaagaagcgtataggtaacatcgtctcctttgtcagaaggaacttgaaaatcatccttggaacttaaagctttgacgatggctccgccgccttttatatggattgaggagccgctgtaggtttttactttcagcccgtcaaaagcggtatcccctttaaatccgtaaaggccggtgtcttctttcaagacaagtgcagcacggaaatctgtcataaactggccaaagctaaggttcggatcaatgtatttgtggatgatattctgcactgcttgataatcagtatgtggatcactaatcaattctttataaatcgtgtttccttgtccgcactgggcctttaaatactccataaacaggtatgacaaagaatagtttgccaatgtgtcacccgcataatcccaatacaggagcgaatggccttttgtaatgtccgcatcttcattgtagtaatcgatccggtcattcaacggtgcaccggtataaatttgttcagccgccatcgagaggccctcatccatccaagtatccgtatcggtcaatccttgcacaaatactttctggttaaaattaatcatatgttgaaactcatgcgccagcgtagaataagcttgcgaaacatctttcgtagcagacatgcccatcaatggataggtatcaatatagaaaatttccgactcattggaatagctgtaatgatacaggtcgcgcggagaaaaatacccagccacgtaaccgccgcttccactaaatccatcttgaatattatagcatagtatattgaccttcccattctggtcgacatcagatggcattccaaagttgtcgacatctgatcgatagattttattatcgaattcttttccaagtaatgctgcttcatcctctgtaatatcgttgttgttcacccaaacgttggcatgagcgccactataaaggagcgttgcagaaatggatgaaaactcgttggtttctaagttttggacgtagaatgatttgctatcccctttcacatagtcttttttaatcgactttgtctcttttttcaaagctttattttggtttttctctgtgtcaaacggtgccacataatccatacgatatgcagacgggctgagatttttgctgtcggcataggcatcattattaatacggaaagaaccggtatattcagagactgagccatcagtagattcattgctgatgagttcatagtacttggtatccccggcatttgaaccgctgcctttataaaacgggtttgccaccttaaagtaagtcacaccgctgaagtattgatccgaaaagcttcttagtgtgcctatccttatataaatatagggatcattttcatagagtgatttatcaatggtgtaacccaagttaacatttcctgtaaacccacctatattgtgataggcactccccaaataatccattactccatttcggttggtatagaattcagcatacaaataagggtccgtgctactgctattgcaagcatggcgaatgagcagctgcattttggtgtctgagtattccgctgtagagagataggtaagataatgatagctgccataggtgtctttcaaagcaccggcatattctccctctccaaccaatggataatcgtccggatttttgtagttttgctgtccttttttatccagatgaggcttggtattctgattcaagccaacatcagcggatcccaccttattttgctggtcagccttactgcttgcctgggcacctgtcggcaacccagcgatcaaagaaaacgccaacaacacatagagtactattttcatttttttcatttgattccccccctaatcttttaccaaacaaatgcggtgcttttcccccattttgaaggataaaaagtatccaaaccattaagacaaaagaagacattctttataggcaaccagtagcaatcggtgcagtaaggattttactcccattctgcatacggtataaattgcatccaaatagaaactctctcaagtagccatgttgaaaatttggatggcgcaaggaaaaatcccgaataaataattatgatcacccccaagtatgtattcatctttttttcagcttccccaactgcttttctatgggaatatacagtatgatgatttctttcaaacgtcttatcagaattccttataaaaacggaggtaaaaacgctttattccaagtttacaatatcttctaaatattgtctagctggatatgcaaatttcagttctgaagnnnnnnnnnnnnnnnnnnnnnnnnnnnnnnnnnnnnnnnnnnnnnnnnnnnnnnnnnnnnnnnnnnnnnnnnnnnnnnnnnnnnnnnnnnnnnnnnnnnncccacatttcgcacgtcttaaatatagttcattctaatttttgaatgaactatatttaaatggcttggtgggatgatatcttcttatttttgaggaattttcgataaaattcttttcaattcgacattcttttcatgaattcctcctattgcgtgttattctcctttgttttcgacattttttgacacgtatattgatacatcatacccgcataattcaatgatttttttggcttgtgaatcaatattatcgggtaagagccttattttttgttgattttgatttataaggatcacggtaatatcttctaattgctctaacaatgcttggcctgtgggttgatagagtttcctttttcctttcaagattagagataggttcttttctttcagttcttttctaactcgatattctaaaattccatagattaataaagccatcacatacacaatacctaaggcctcaaccctttccggggtttttaagtaaatggcatcaatcatttgtgaatctttgattaatcggaaacgggtctcagcggccgactgtcctttataaaccctcaaaacttcttgattggatagtgtctcctcatctaatttatttgtgattaaaacaaaagtgctgagcatttttttcttattttcgataaaatcatgatctttttcaaacgattccagttgtatttgatagatttgttcttgttttgtctgttcgtcctttttaggtcttcctctcttttttcgtttgataggttgatcactcatctggacgtttagtttataacagaaatatgaagccttttgttttttcttaaaagattgaattgcttctagtgcgtcctctttacaatgaaagataactttactcagtttttctatctctttttttaattgtatttcttccttttcgatcgcccgatttagggttttctcttttcgttgatctaaattgtttgagtggacaacaagaaaccggtaaggaaggttttgaatttgtctttcaaaagcttgaatttggtaaatagctgcgtcttttttattgctaagtgagcctaccctttcccagttgttgagcaaccatgcctctttctttagttctgtgcttaaaccgaatgtatcaggtaaacgggaaataaacgataaattttgttgttgaatttccgctagattttccgttgtgattaatgcagaatcggcttgataaatgagatttttccaatcttcatgggaaaggatttttctcatcttttgaatgaattccacattccaagatttatccgaagtattcccattttctacttttgcaaggataggaattcgttcaggtgtgacccccatccccagaacgatttgttttaagtcaggcctatgggccttactatacccgtacgtaatttgcagtccatcttccttcggttgcttatattcgccgtaaacagaaattgaggttgtatcgttatgcagtataccaataggaagattcaatttttttagtgcttttaatgcaagggtggaatagactttccatgcttcggcttcatacaagtaatctaatgctcttcctaatgcatcatcatttaattgatcgggtgaaaccgatgtatcgaaaagcatctcagaatctaggttttgatagaattcatgaaccttataaaggggcttgccactgcataaaatgtttaagacaagggctttaatccttgttccgggtgagatatgacaacggacagaatcccatttgactaaatcattaatggttttttcgagttctatttcatcacacagtttagataaaagttgagacggccccacatgtaaggttaaaatttgatctgacataaaaatttcctcgtcttcccctagtttagataatcattcaattctacaaagaaggagaaaattcctttaaaaaaatcttaaaatggaaaaatttacgtgcggaatatgcgtttagtttgcttgaacgtttctatgcaccaacaagcggatcaatcaaatttggggatagtatttctccagcaattgtttttctaataaaaactttttcattctatgtaagtttttaataaaaatagcttctttttttaaatcgccttttgttatgctcccattcctttgtaaataattatataattgctgttgtactatagcaattttatttgcgtagaaaagtgttttcaatacaattaatgcatcttctccaaagtcttgcttttccgggaaaaatatattattacttactaacaaatcccttttaattaatttgttccacaagaaatttcctattagaaaatttctgtttaaaaaagtttttataacttcatctttaggaaagctatccctaggtaagtttcctagttccattttttcaatactattatcttcataagccttatttgcaccacaaatgacaatttcactatttgtattaaccgctctcttatacatggtatatatcatatctttctcaagccaatcatcgctatctacaaacaaaatatattgacctattgatcgtgaaattccaatgttccttgcttgaccaactccaccatttgatttatttatcaacttaatgttattatagaagtctattaagtctattattttgtctatactatcatcttcagtgccatcattaactatgattacctcataatctttaaatcccttttgctcaataatacttattaagcattttcttatataattacttacattaaacactggaaggataatagaaactttgggcatccacatttaagttcttccttttctctattaatattacttaataacggcaaccttttaataatcttttggcacacttttaattgttttaactaatgaataacatgcaatcaatccgtgaataacaaaataaaaaatcaagtaaatatttgtaaatttaaaaattactgctatcaacagcaaaggattacataaaccggccattcctgctatatttaatcctattatatggaataaaccataatctttacggtttgttgtttcagaagtataattagaaaatagtgtatgtgccttatgatcgactagtctcgggaaaatggtaaaaatagacgtaagacttcctaaaagaaggtacacccatttttgttcaccaaacggttcgtagtagttttgagagaaaaagacagataaaccgatacatatatataaaaaggttgtaaaaaaataaccacttaacccatctaaaaacattccaaacgtactggttttctttgtgaatcttgcaatattaccatcaacacaatctagaactatccataaatttattagtatcgctccaattaaatgaaagaaaaacccattaggaataaatataaaagagccaattaccccaatgatcatagatattattgtagctaaattggcattaatttttacttttaaaaatagccatgttacaaaaaaggacaatgggcgaataacataataaacccaaatatccattttatcaatttttattttttcctttggcaagctatttcttatatcatcaatttttattttttccattttaatccccgctaaacattttttatatttttttataatttttttattcatattgtcactagtgaactctaattcaaatttttttcttgcattttcccccatttttttcagtttgtttttattcaaattttttaaaatttgttccagactacttaaattttccatatcaaatatataaccatcttgttcttcttttattagttctggaagtgcgcctcgattgcttacaattacgggtttgtaatttttcatagcttcaataactactaggccaaaaccttcccaccttgatggaacaataacagcatccattaaattataataactatcgatatttttgggtgaaacccatccgattttttttacatggtgaggtaaatttaaattaatattctcgtttaagacagcagcacctattaggaacaactgtatattgggaaaataattcttttcaaataacctcaataatatgtcaaggcctttttgtctatcaaatctaccaacaaaaagcaaatttatttttgaactatcaatttctaattctaatcctacgttattaatatttctatgttcctcaataccgttgtaaattaattctgatctgttaattggaataccatacttctttgaattaactaactcatgctttgaaatatttaatattagatctgttctatacgctaatattttttctataagaccatataatcgtttttttaaattagatgtttccattaaaaaactccaaccatggggacagtaaacaatttttatattcttttttgaacaaaaaaagaatggtattcttactattattccagcaaaagtgctgtgcacgtgaactatatctggttgtatttgattaattagcctttttataaatagcatggctttaattatataaaacggatttcttttatatttataaaagaatatattatttttgcatattgggaattccttttctgatttactgtcacttaaagctaaaaaaacactatcaaattcttcactgtttttttgataacgaagaacattatataaataagtatatacccccccttttacgtattctccaacatgtaaaatttttttcattaaatctccaccgattcatttcattttagtaggcattatttggtattatcataattttcaaagtttttaatattaattttatgtctaaccagatcgttctatttgtaatataattaatatccaaatccaccatttcacaaaaacttagttcgcttctaccacttacctgccataaacctgtgcatccaggtttaacaagtaatctttgcatatcatacttagtatagtcagcaacctctcttggcaacggtggccttggccccaccaaactcatttctccctttagtacattccatagttgaggaagttcatcaatacttgtttttcgaataaactttcctatcttggtaacacgcggatcttctttaagtttaaacatagcaccttcaatttcattatatttcaaaaggtcttttagtttttcttccgcatcggacaccatggagcggaatttatacatgtaaaaggtcttgccattttttccaactcttacttgtttaaaaaagactgtccctttaggatcttcaatttttatgagaacagcaacaattaaaaataaccatgataaaaaaatgagccccatactcgcaccaattatatccatcccacgttttatcattgtataggtttttttctcttcaaattcaatcttttttgtggtctctattttctgggtagcagaggaccttacaaccgaactggaagcataactggtgtcagccacttcaaataccccctatttcgtttccaatacacttgtatttgttttttcaatgattcctttcatcatttttaacaagtctttgctcaatgtctcatcctgtaaagccatttcaatttgggattgaataaagccaagcttttcccctacatcataccgcttaccctcaaactgataagcaaatactctttgaatttgattcaactgctgaatcgcatccgtcaactgaatctctccgccggcacccttttcctgcttatccaaaaacataaatatctcaggcgtcagcagatagcgcccaataatcgcaagattagatggtgccgttccctgttctggtttctcaacaaacttttctacttgataactacgtccgttttgggaagctggtgcaatgatcccataacggtgcgtttcttcttccggtacttcctgtacacctattacagaagaatgggttttttcatattcgtcaatgagttgttttaaacatggcgggtcattctgcacgatatcatcaccaagcaggaccgcaaatggctcgtccccaataaaatttcgtgcacaccaaacagcatgtcccaaaccaagaggctctttctgtcggatatagtggatattggctaaattggaagaatagcggactttatctaagaggtcgaacttccctttttcagcaaggttttgttcgagttcccaagcgttgtcgaaatggtcttcaattgcgcgtttcccttttccggttacaatgatgatgtcttcgatgccggattcaacggcttcttcgactatgtactggatcgtaggcttgtctacaatcggcagcatttctttcggcatggcttttgttgcaggcaaaaatcgtgttccgagccctgcagccggaatgatcgcctttctcacttttttcacgtaaattcctccttattctaattgatttttaagatttgcgcagtgcgataaaaacaatcgatgtttgttcttccaacattcgggtataaaaataattatcgggcatctaacccgccctcacaccacactcttgacgacaggcgtctaaggtgcacgcgcacccacagcatggccgagtgcctcgcacgataacggatgagagacatacccgaaaatagctgttccaaaatcaaacaatgttggataaaactgtttgctaaaaacagcggagcagcccacatagcatcattcatctacccggaatgttaaaaaagaaagccgattaaaacaaaccaaacagtttcttttgttttaccggctgcggaatttctctgtagatagcttggcctttggcaagcagttcggcgttttccgtaaagaaatagagcatatctgtgccgtatttcttttcgagttcatccgttgcttcatccattttaaaagcacgggttttcacattatgggcgtctgatgcaagaaaatgggtgagatttgcttctatcagctgttcagtgaattttttaatctttttcccgaaagcacccgttaagcttgcggctgtaatttgtgttgccacaccattattcaccatttcatacaaccgatccggatgctggatcaattccgcgttcctttccggatgaacaataattggcattaagcccttcacttgtatctcatataaaagggtttccgcatagcgcggcacatgccccgaggggaactcgataaacaggtaagaagtgccggccagcgtttgaatttctcctttttcatagtcttccaaaatttcgccataaatccggttttcctgccctggcagaatctccagatcaatttgttcttctttcaatctttcattcagttcattgactttttgaacgatttctgttttgcggttttcatattttccgttcatatgatgaggggtagcaataatctgcttgatcccctgggagacggcttgttttgccatatcaaggctgtcgtatatcgtttgcgcaccgtcgtcaatgcctggtaaaatatggcaatggatatccatcatcccgaacccctccaaacctgtcaagaaatgaaatttcgtttcaattaaaatcaaaccctatacaaaattatagtgcatttttaccatttttcaatagttattggaaaacttacgtgcaaatggtgtcaatcttttccgtaatagtaataataatgcgtgttttgggttttcttgttgttcaggacaacgccaagcagattggcattggcagattccagcaattcttttgcctttttgacagcttccacttccgctttcccgcttgagacgacaagaatcgtgccatcacactggttggtcagcacctgcgcatcggtcacagccaaaaccggcggggtatccagtaaaataatgtcgtactgttcttttgcttcttttaaaaattccttcattgcccgtgagcttaacagttctgccggatttggcggaattgggccgctcggcaggagatgcagatttttcacatcacattttgaaacagtctccagcaatgtcccctgcttggtcaaaaccgttgtcagtccgaatgtattggtcatgccaaacgtataatggacggtcggacgccgcaaatcggcatcggcgagcagcaccttttttccttgctgggcaaaaacgacagcgaggttgccgacaatcgtcgatttcccttctccaggcccgcttgaggtaaccatcagaatctgcaggtcattgtcaacggaagaaaaactgatatttgtacggattgtccggaactgttcggaaatcggtgactttggatttagctttgcgattaattttcttctcgtgttcaacagctttgtttttttaggcgccaaccgtctcaacctttccttttgttttttttcctgcacggtgcaaaccattcagttcctgatcatcaatctgcccgatcacgccgaggacaggcaattgcaaaatttgttcaacatcttgctcatctttaatcgtattgtcgaggtattcaagcagaaaggcaatcccgacacccgccatcaggccgaccacaagcgcaattgcaatatttaaaagcggtttcgggctgacaggtccctcgggcacttgtgcttttgaaatgacagtcacattgtcgactttcataatggatttgatttcttttttgaacacttccccgattttattggcaattttggttgctatatacgggtttgtatcttttaccgtcaaagtaaagacttgtgaattttgctctgtgctgacttcaattttgtcgttcagttcgtccgttgtcatgttgagtttcagttcgtcaatcactttatccaggatcgatgggctcttaataatcacattatatgtattgaccagctgaacgtttgtttgtacggcattggtggtatacatcgattggtcatcgcttgctttattgacaaggatttgtgtcgaagattcatagacaggcgtcaccacaaaataggtcacaatggccgtcaaaatcatcgcccccagtgtaatcagtgcgatcatggaaaggcgtttgcgcagcacctgcatcaattcttttaaactaattgtgtcttccataagttcctcccctaaaatttgcagcacaaatgcgaaatagatagaaaactatcatacattatatcatagatcatcccgaaatttgcgggaaactgaaataaatttaaacaatttgatacactttgtattaaaccacaatattttgcagaaagaaaccggttagataatcttcctgtatttacctttggcggattttctttcaattttggttgtgtaatttgtctttttttgtcataattttttataggtttgcacgggcgtttcataagtgatgatgagcggaggtatgatgtatgaaaatattcacggcgattttgtcggctgttgtcgtcattgccgtattggtagttgggcatctgtactgggggtataaaacggatccaagccggttcaagccggattctgtagcagtaaaagcggaaaagacaaaggcagaaccgaccacggggaaaaagcgcgacgtaaacaaaacgggccagccggagacttctctagtggcttacacgaaaaactggccgaaaaaagcccgcgcggattttgaaaacgcactttccaagaagcgagcctacaaaattgcgattgtcggttcggacgcgatgggtgcgaatacgcatggctgggggccacagttgaagcaggcgttgaatgatacgtacggcagccatgtgtcggtttcccttttttcctatcatttaaattccgatgagtttatccgtgaaggcaagtataaagacgtcgcccatttcaaaccggatctcattttgtttgagccgtttattttaatcaacaacggggctgtggcgatggacaatcagcttgaggatatcaaaacggccgctgctgcctggggtgatgcagtgcttgtgatccagccgtcatacccgctctataaggcggcaaactatccggcgcaggtgaaagagcttgaatcgtacgcaaaaaaagaaggttacacgtatctggaccattggaaaaactggccggatccggacagcgacgcatttaaatcgtatgtcacctttcaaaacggcgagcaaaccgccccgagcaaaaagggcacaacagcatggtacgactacttgcgcaagttttttatcgcagattgaggaaaccgttcggcagccttgggaaaccggggtgtcctggacgggggaggcaagggcaaaagcggcgaacacccaatcatcgtggatgctcgccgcttttttagtttatcagtttttagttcgtttcatgttgctttcgctaccccggatgtattgccttcacgggcacgcattcagtgctgcctctctttttgttccatattttttttgattttctcgagggcttgcctccgccatttttttaccgcctcggcggacttgccttcgcgggatgcgatttcgccttgtttcagttgttcataaaaggcagccactacccactttttctctttttccgaaaggccgtcgcaatacgacagcaacgtttcaagttcaagcggggggcggagcgactcgtccactttcacattccaaaattcatctttcgggcacgcaaacatttcttcctccctccgctttttcgtaagttcggtcagcattttcccgcggatcgtgttgtatgcgtaacttgtgaatgaccctttgtcatcctgcctgttttgatacgcttcccacagtgcaatcatgccgatctgctcaaactcatcgatgtttttgtaaatgcggagtttgcggatcatatgaaaaatcatcggccggtattgccggagcacttcttcaaaactttccattttgcttccccttttggaaagcgcgctttccttgaattcccgggttgattgtaaaataacaggttcaaagggagagggcgaaccggcgatgtgcatcttttcgtttccaaaacatccagttttccgcacgaaaatttaatgttttttaaggggaaacgtgaaattttgcccaaaatttacacggattataaataataacaaaattgtaaattcatactttattttttagagatttatagtataataggaccagggaacaaatgatatccctctctttcaggggaaggatattttggcagcagcaagacacggcacccctggcctcctgcccttcatacagaagagagggaatgcacaattgacaacaggggggagttttttagatgaataaaacagattacctcattagagaagaaacgatggcgctggataccgcatttgacccggaatatcagacaatcatttatgatcaggacggcgtttttcactcacggaagagcaagcttgaattgttgcgggaagcttgcattcattaccggatgtgcgattttgaaggcgttctcaaaggcacaaaacaaatttttaactttaataaggcaccggttgtgttgggggatggtttgattgcaacgccgacaaaatccccgaaatcgtatgactgccagttcattttccttgcgaatgtggtagactttaacgccacagcggacggcctttatgtgactttttccaaccagcaaaagctaaagctgaactgctccatgcatacatttcaaaagcaattcagccgcacaatgatttgtgccggctattaccatggcctcggcaaatacataccatggaagaaaatgatctaggggcattccgggggctttgagaacgggcgtgcaattcctgaagttgggcgatacaggaataaacgaaacgaacattcatccactctgcaaaaccatccaaccaatgtacgcatgcgtttccttccaattttgccggacggagaaatgatgcgcatgcgttccctttacctatgttccgctttatgaattttaaatttacctgtcccctactcttgttgcgaatctacatattttgggttatggcagtttttcctatctgatttggccaggattgtgaagtgccgatcctgtattttggcgcggctgtccaaattttgcgcatggctttgatttggttttgcctcaatttgcgccattttggatgttgatcctctccatcgatttcttttgcatttttcgtttatcggcctgagatcagggaataggaaagatgaacaatatgaatgggaggaatgaaaatggatcaagacgccatgaaggacaagcttaaaggaaaagggaacaaattgaaaggcgaagcaaaagatacatggggtgacattaccggcgatgcgaagaaaaaagctgaaggcaaaatggacaaattgaaaggcgaagcccaggactcggtcggcgatgcaaaagaccgcctctcccgtaagtaagcactttgcttttgataagacactggaagattggctaatgtcagaacaggacaaaacagttcaatgcggatttgacgcccgtgccacaaaggatacggcaggggcggaaggatgaaaatccgccgcagtcgccgcacattttcagatagatttttaagctcggattccgatatccgggctttttcatgtgggtatttccgtggaaatattgctggttttgtcgaaattaagcctatcatgtcatcttgttagggcagcaaaaaagccaatattcgcagcgtttgagaatgttaggctggatgaggaagcatatgtcttggccttggcaagggttgtaacagcactggctgaattttagatgtaaaggttgcacccggagctgatttaatgtaggcgttcatgccacagggaacgtggcaggtgagtaattttatagaaggaaaacggggtcaagcattttcgggcttgctggcaagtggtatttgttcaaaaaaacctgttcaacatgcacggttgcacaattttcattggaatgtttcccgtggaacattgagggcggaacagaaaagccagtgcaaattttgtcgattaatacggttttttgcagaatggtatatgggtccgggttccgcattcttctgtcgaagccgcaaaaatgcagcatggcgcctatggtaagaaagtggcgggtaagctacaaaattttcgactgattgttaacatggactgctctacggtaagatttttgcctgtcagttacacgattaggaaagcgatggaattttcagccgcttgttcacgtagaaaacgtccatgttttcttgatgtatggccgttccttgctttaaaaaacccaaagcggtccggggcccgctttgggggtcataccgcaaagtatcttgcctccggatgggagaacacgagcgcggtgacggcggcttcgggttccatcatgtagccttcggtcaagtggaggccgattttttgcggttgcagcaatttaaacagtttggcctggtcttcgaggttcgggcaggccgggtaaccgaaagagtagcgctggccctggtatttggcggcaaagcgttgctgcattgtgaaaccggccgggtccgggaagccccattggccgcgcatcagttcgtgcagccgctcggcgaagccttctgccgtttcgagggcaagcgcctggagggcatggcttttgaaatattcgcctgcctcttttaaatagcgtgcgtggtggcggatgtttttgccggcgacgaccgcgaacatgccgacatagtcaacgaccccgctgtccacgctccggacataatcggcaaggcacaaatacggcggctttgcctggcgcgggaacgtgaaccgctctaaaatggataaagatttcggatctaatactccaggctctccagccggttcataaacaatcaaatcattaccatccgcctgggccgggaaaaactggtatacggcggatggctgaagcagtttttctttcatcacccactcgcgcagttcatccacctgctgcttcagcttactggcgcgttcgtctccctccgcaagcagtttttcgacgcggcctttcaatcctaaatggtggccgaggagcatttgcatgttcacgtagggttcgatatgggaaagcggataattgcgcagcacatgccgcttcaaatccgccggctggtaaacgcgcgcatccggggataccgaagagcggcgcggtaaagtcgcaaccggcgcaccgccggcattcgccgccgccacccttgtcccgccgctgcgctggttggcaagttccgtttcgagcgagctgcgttccgattcatcctgcaatttgtttgcaagcgtgaggccctccattgcgtcttttgcatacagcacaagcccctcatattgcggagcgattttatttaacgtgaattttcgcgacaaggctgcaccgccgaccagtatcggctggcggatgcccgcttcccgcaaatcctgggcagtgacaaccatttgctgggcggatttgacaaggaggccggatagcccgatcacatccggtttctctttgcggacagcgtggataagatcagccggcgccactttgatgccaaggtccaccactttatagccattattcgacaaaatgatgtcgaccagatttttgccgatgtcatggacgtcgcctttcacggttgcgagcagcactttcccctttgtgcttgtttcatttttttccataaaaggctcaaggaatgcgacagatgctttcataacttccgcactttgcaagacttctgcgacgatgagctggttgtcattaaacaggcggccgacttccgccatcccgtccataagcgggccgttgataatggcgagcggatccgggtattctttcaaggcctgttctaaatccgggatgaggccttctttcgtcccttcgacaacatcattcgcaagccgttcggcaagcgtcatcgtgctctttggcgcttttttctcctgcactttgccgcggtaatattcggtgaacgcggcgagggcttcgtcactcgcttcaaacaacagtttttcggccattttcacgttctcttccgggatggacgcaaagcgttcaagcttttctgtatttacgatggcgtaatccagcccggctttcgtacagtggtagagaaacacggagttgagcacttcacgcccggcaggcggcagcccgaatgaaacattgctgacgccgaggatcgtctggcattccggcatcgcttctttaatgagccggatgccttcgactgtttcttttgctgcgccaaaatactgcttgtcgccggtgccggcagggaacacgagcgggtcaaaaatgagatcacgcgggttgagcccgtacgtatggacgagcaggtcataagagcggcgcgcaatctcaagtttccgttcggcagtgacagccatcccctcttcatcgatcgtgccgacgacaacggcacccccgtattttttgaggagcggcacgactttttcaaaccgttccgtcccgttttcaaggttaatggaattgacaatgctttttccttggcagtatgtaaaagctttttcgatcacgttttcatccgtggaatcgatcataaatggcactttcacttttttcacggcgattgaaataaagttttccatgtcgctgatttcatcgcggtccgggtcggcgaggcagatgtcgatgatctgtgcgccgtttttgacctgggtgcgggcaatttcgcttgcttcttcccatttgccttctgcgatcaggcgccggaacttgcgcgaaccgatgacgtttgtgcgttcgccgacaaaaatcgggcgggtggacgggtcatcgtaaataaaaggttcgatgccagagacggcgtggtgctcttcttttgcaggctggcgcggcgggagcccggctagtgcttcattcagcgctttgatatgggcaggtgttgtaccgcagcagccgcctgcgatgttaagccagcctttttcggcgaagcctttcatttttacagcgagcgattccggtgtttcgtggtaatgcccttcttcgtcgggaagcccggcgttcgggtagcagctcactgccgttttggcgagccccgcgagtgtgcggatagagtcagccatgaactccgggccagtcgcgcagttgagcccgacggcggccggctgcatatgcgcgacggaaatgtaaaatgcttcgatgttctggccggcaagcgttgtgcccatcggttcgatggtgccggagatgagaagcggcagtttttttccggtttcgttaaatgcatccgtaatgccaagaaaagcggctttgacgttcagcaagtcctgcgatgtttcgaggaggagcacgtcggccccgccttttatgagcccgcaagcctgttcctggtaggcggttttgagcgcgccaaaagtggtgccgcctgtgacggagagcgtctttgttgtcgggcccattgaaccggcgacaaaccgcggccggccgggtgtggaaaattttccggcagcctgcttggcgatgcgcgcagcttcgatgttgattttttcggcaaagtgcccaaggccgtactcgttaaggacgatggacgttgcgccaaatgtgttcgtttcgatgatgtcggcccccgcttcgagatatgcttcatggatcgagcggattagatcgggcgctgtgagattcaagtattcattgcagccttcgtatgcttcgccgccaaaatctgccgcggtgaggtgttgctgctggatcatcgtgcccatcgccccgtcgagaatgagaatgcggttcgcaagctgctgttcaaatatcgttttccccatgaaaaatgccccctttggttgtgcgtttgatcggttaaattcaggttgccgggtagccaaagaatctcctatacttttagaaaatgcccgcgctgcgcactgctgttttttcgtggatgtagcgcgtgcattccactgtgagttcatagcgttcaagcggcgtaatcaggtaaatgccgttgaaataggcgagggccgcatcgatcagggtacggctgatcgcaaggctttcttcgcgcgctttcacagggtcgccgtttgttttttccatcgcttgcaaaatatcatccgtcagtgtgatgcccggcacttcattgtgcagaaagaccgcgttccggtagctggtaagcggcataatgccaagatagatcggcgcgtccaaatgcttcgtggcttcatggatttgctcgattttttccgtgctgaagacaggctgggtgataaaataatcagcaccgtggcggattttgcgttccaacctcccgaccgttttatcgagattgcggacgttcgggttaaatgcagctgcgacggaaaaatttgttttccgctgaagcgatttgccggaatgggaaatgccatcgttaaattgcttgatcattgcgatcagttccattgacgacaaatcgtatacgctcgtggcccccgggaagtcgccgattttcgacggatcccctgtgacggcaagcacctggtcaatcccgagcgcggcaaggcccattaagtgcgactgcagcccgatcaaattgcgatcacggcatgtaatatgaacgagcggccggatgccctgtttctcttttaaaatcgcggcaatcgctgtgttgctgatgcgcgggcttgcaagcgagttgtcggccattgtcaaggcatcgatgccggcgtcgtgcagcgcttttgccccttcgaaaaagcgggctgtgttcagcgttttcggtgtgtccaattcgacaatgacggaacggcttttttttacaatttcatgcaacggcggttcgtactgcgccggggcggccgcgatttcgattttcggcgggcggaccgttttttctgtgacaggcaaaagcccctgcaccccttctgcgattgctttgatgtgggccggcgttgtgccgcagcagccgccgatcaggcgcacaccctgttcgacaagtttttcggcgcatgttttaaaataatcggcgttattcgtaaatgtgaaccggccttcctcgtaatctaaaagacttgcattcgggtatgcggacaaaaaggcacgcttcggtatcgggatttcttcgaacgcctggatcatgtggtgcggaccgagccggcagttcaggccggtcacatcggcgccgcggttttcaagttccttgaaagcatcgcggaccggggttccgttttggagcacgcccggttcgataagcgagaactgggcgatgaccgggacatccgcttcttttttcgcaatgtcaacgaccgtatacagttcttcagcgtcaaaatacgtttccagaagcagggcatcgactccttcgttcaggaggtgaaaaatctgttcgcggaacgtacgcttaatttcggcaagtgttgcttcggttttgcgctggccgcggatgccgccgaccgtgccgagtatgaatgtatcgcggtttgccgcttcttttgcaatccggacggccgctttgttgatgtcttttactttttcttccagtccatactgtgcaagcttgatatagttggcactgtacgtgttggtctggatgaccgatgcgccagcttcgatataggcgcggtggatcgcgtggatgtcttccgggtggctcagattgaatgactcataacatgtgttggcgccgtatgcatacagcagcgtccccattgccccgtccgcaacaaggatgcggttttttaacgtttcgagaaagtccaactttttacactccctttgcatgatatgaaaaaagcctcccggaaaaggaggcaagatgacaacattctccttatcttttcaggtatacctgttggatttagcaccgtgccgtatgggctggttgctgaggtttcatcgggccaagtccctccgcctctcttgataaggctattcgattgaacgtacttaaaattttgacttatttatactttacactttgccgggtgacatgacaagggggaaattgaaattcatattggatgcggtttcgtcccttttgtctaattggctttcttttgcctttttgagccctccaaaaggacaatttgctcccggtacggctttcttttgtctttttgaaccctccaaaaggacaatttgctcttggtccagctctcttttgtctttttgaactctccaaaaagacaatttgctcctggtccggctttcttttgtctttttgggcccttcaaaaagacaatttgctcttggtccggctttcttttgtctttttgagcccttcaaaaggacaatttgctcttggtccggctttcttttgtctttttgaaccctccaaagagacaatttgctcttggtccggctttcttttgtctttttgagctctccaaaaggacaatttgctcttggtccggctttcttttgtctttttgagctctccaaaaagacaatttgctcccggtacggctctcttttttctttttgaacccttcaaaaagacaatttgctcttggtccggctttcttttgtctttttgagccctccaaaaggacaattcgcccctgatccgactctcttttgtctttttgagctctccaaaaggacaatttgctcctggtccggctttcttttgtcttttagagctctccaaaaggacaatttgctcccggtacggctctcttttgtctttttgagctctccaaaaagacaatttgctcctggtccagatctcttttgtctttttgagctctccaaaaagacaatttgctcccggtacggctctcttttgtctttttgagctctccaaaaggacaatttgctcttggtccggctctcttttgtctttttgagctctccaaaaagacaatttgctcctggtccagatctcttttgtctttttgagccattcaaaaagacaatttgctcttggtccggctttcttttgtctttttgagccctccaaaaggacaattcgcccctgatccgactctcttttgtctttttgagccattcaaaaagacaatttgctcttggtccggctttcttttgtctttttgaaccctccaaaaggacaatttgctcccggtacggctctcttttgtcttttagagctctccaaaaggacaatttgctcccggtacggctttctgtctgcaacaaaaaaaagagccggaaccggcccctgttattcatccaaaaactgtttgatggcttcggtatttttttctttgtccacttcgagcgcggcgccgacgcccggataattgacattggtataggtaccggcaaccggtacggtcattgttttgaccttaaggttgccattgaccatggcgtctttgacgagcgcaagaatgttcattttgctcatgttggtggccatatacggctggatggttccgagcagtttcggtgctttggcgatgccgttcacgctgaagacttcagattggagcgctttaagcactttttgctggcgagcaacccggccaaagtcgccttgcgcatcatgtctgaaccgtgcgtaggcgaggagttgtttcccatgcatgagctgtttgccaggataaagcgtcaagccgatgtttttcgacattttatgttcgacgttcatttcaatgccttgaggcgccagggtatcgacaattttaacaaagccttggaaatcgacgagtgcataatattgcacatcaatgtcaaaattggttttgagtgcttggcggagcagttcaacgcccttcttttgatggttcaaattgccaagataataggcagtgttaattttatagtttctataccccgggatttcggcataaatgtcacgcataatcgaaatgagcttcacctggttattcttcgggtcatattgggcaatcatgatggtatcggttcttgaatcttcttgcccgcgccgatcaattccgagaaggagaatattggtgcggccatttgcatcctttttaccgttaaattccagattgtccatatttaaggcatcattcgggtctgtctgatgaacgccagcgtagtattgataggctgtgtaacccgcgccggcgacgatgagcagtaaaaagagcataaggaacactctgcgccagcggactcttgaccgttttttcttttttttcgctactcttgactccatagaatccctcgttttagtagtctgtcttcattattattatctaaaagcggcaatttgtcacgaagattttgatgaaattttgttatttttgtcgagatcataatttgtgggggatttcacataactttcatccaaagttaaggcgttttttattttccagcggtatattgatgtttgtcatcaggtaagagcttttgttggttcgtctgctttgtgcaggcgtttttttatggccggagacgtggaggccttaagcatttattaagtttcggcaggtatctttttctttgcaagagagcttacaacctacttttttcatatgccccttttttaggccgccgcccttgtgcaggcggtttttttctgggcatagtgggcaagcctgcctcttttcggaatttcggcctgttaaggttgttttaagctttcggcgttatcctttttcttgtaatcaggcaagatgaaaatccggcttgctttttcatccatgttaacccccttttttggccgtctgctttgtgcaggcggtttttttctgggcaaagtgggcaagcctgcctcttttcggaatttcggcctgttaagattgttttaagctttcggcgttatcctttttcttgtaatcaggcaagatgaaaatccggcttgctttttcatccatgttaacccccttttttggccgtctgctttgtgcaggcggtttttttggttaaggattttgaacaattatagcagctaatcccctctgtatctttgatttagtgggagttagccgttcttgggatccgaaccccaccgtttccactcttccctcatctatggaaaaagcctgcccccctaatcagagggtcaggctctttttttcttgcggtacatcgagtaagcgatataaagcacaatgatgatgatcgcgataatggtaaccggcttgacataaggagccgcgacgtcatcaatttgtgcccagtttgatgcgagacgttcaccgagaaagataaacagcaccgcccaaggaatggtcgcaagcagcgtgaaaaaaataaatttgaaatacgacattttggcaatgccggccgggatcgatatggcctggcggatgaccgggatgaaacggcctgtaaaaataacgccggcgccgtacttgttgaaccattcttccgcgagatcgagatgcctttcgtgaatcagcaaatatttgccgtactttagcaggaacgggcgcccgccgtatgcaccgatccagtataaaatcagttgggcaatcaaaatgccgagtgtgcctgctgcaatggccccaaaataattgatctctccgcgggaaattaaataacctgcataggcaaggacaatctcgctcgggataatctcaatcgcaagcccgagtgcaacaccgaagtaacccagatcagcgagtgctgttaaaatttgtgtgacaaaatctgagaacatgtttcccctccaacatttgctttcttatccatcatatcatacggaaaatttccagcaataaaatatttaagccaagccagacgccaccgaaaacgtaaccgcccgcaatgttgctcggcacttcaaggctgaaataaatatggctgacagctgcgaacaacagaacagctaaaagaagcacatccataaacgtatggacccaaaacatctcagcgtgccggacgacgagatatgtaaaatagccgtaaatgatcagaatcatcatcgcctggtcgctcggaaaagagaagacaaagtgggaaaacgtcggaatttccgtttccgtcatacggtggaacacttcatgcagcacgttttgatagagttccccgccgattgtaacaagcagcataatcaaaaattcgtgcgtgcggtctttgcctttccaaatgatccaaagtaccgacaacaccatgacgagaatgagcgcttgccgcgagctgagcgccagcattcctttcaaggcgcctgcccaatggtgtttgaacaaaagcgatacgattaaagcggtcacctcgttgaagtcgctgaaatcttcgctgaaaaggttttgaaccattgtgatcattaacacaatcaaaagcaatgtcgccagcgtggtgccgatgatcacaaactcggcgcgcacccggctgcggaaaatcaggaaaagacgccggagcaccgccatcattacccagaaaatctgcttatggaaatagcggaacacataatacgcgatgattaaaccggcgcttacaatgcctccaatgacgagatattttttcacagcttcgtggaactgctcccactgcgggccaagcagcttcccgagggagataaacgtgcttgtccaaatcaaagcgccggaataggcaaaaatggcaaatgaccggaatggcagtttcgtaattccggaaaaatagccggtgatgtggcggacacctggtataaaatacgcgacgagaagcaatttattcccgtatttattaaaccagcgcgattgtttttcaagctgtgccgggccaagatggataaaatggccgtatttatgtaaaaacgggccgccgagccgctgcccgataaaataagccgttgtcatgccggcagatgtcccggtggcggcaatgaggatgctcaaaatccagttcagctgcccctggtgcaccatataaccggcgtagctcatcaacacttcgcctggaagcggaactgcaatcatttcaagcagaagtgccaaaagcagcacaatatatccatattgatcgacgtaggatgtcaccgacatttgtatccctctcttaaacggcgtcaatgaaaacgaccgcttttgtttgcaaaaagttcaccccgcttacagccattttcgggcatcaggcggaggtttgtcaaaaaggttaagacttggtatttgtcctattttaggataggcacttcgcagggaatcattcagttttaaaaccagctttcttccccaggacaggcgcgttttttacacccgttttgcgtcaagtcgggtatggcgttttctgctttcggctgctattcaccaggccttggggaattttttacatgagcttattggttcggtttccgtattttgccagggaaccttcaagattcagtgttttattttcaaactcattttatccgctttcggccgctatgcttcacccggatccgtatgatttttacacctgtcaatcttattcgggattggaaagttcacaacctccttgttgttttcggccaggaaattacatttgcgggtgaacgggggttagaagagggcttgattgaccaagtccattttaacagatttttgaaagaagcctcccatcctcatggccaaagtgcaggcgggagatgacttcaagcgttcgcctgactggtcacatttggcaatcgcaattgctgtctgtcttcaggatggtgtaccgaattgccggttttcgctgcggtttgatggctgaaaatttgagagccatttttccacgttcccataaaacttgttcagggcttgaagtattggtagccggcaaagcctacagctgtatagaaaagtaattttttcaccttaaaaacctccctttctttactccctttattttatatgaaaattcaatggattggaagaactttacccggacaggacttatcggagcatttcctttttcgttttttgtttggaggcggcactgtttcactgagcatttcatcccattttttcccggggatttttcggttcgtatggggccatttccgtcccgtttttgcctgtcgcgggtttgccggcttttccgccgaacacagcatttcccctggatatttttacaacagggattgttagctagttacttttagtaagtttacaattcatgtataatggttaaaaaggcttttgttgatatagccccggaatgcagggttgatgagaaaggtgcgtttcaaaaatgggaaaccaaagtttatgtccgcgtttcgaaaaggcgtttcagctattgggaaaacgctgggttggcgtgattatccgtgtcctgtctgatgggccgatgcggtttaacgaaatggcggagcgtatcccgcatatcagccagaaggtgctttcggaacggctgaaggagctggaagaccagggcatccttgtgcgggaagtgtacccggaaagccctgtccggattgaataccggctgacggaaaaaggcgaggccatcaaaccggtccttgatgaagtgcaaagttgggcagacaaatgggttgatcttgaaagtgaatgataaaaggggttgcttccattctctggagcagcccccttgtttttttaagaaaagaaaacagcaagcaaaagcggaatcagaatgataagcccgatgatggcccagcctgccggatgcgcaaggttcagggtccagccgcttccgaaccttttttccacccataaagaaggatcgttgcggttgaagtaaaaaacaccgagtttccaatacgcatcgtcatcatactggaagcggccctgaacggcaccattgcccacgcggatgcggctgccgccctgcccggtggtaaccgagagcacgaccgccccggccacaatcaacaataccgcgcccatgcccccgtatgaaagcaagaagatcgggaccggcacaataaaggaaagctgaatcgcaaaaaacagtaaaatgagaagcaggcctgcgatgatcataaatgctgaccatctgcgccggaaacggacattttgctcgagggaagtttccggattggcggcattgagctgctgcttgcttttggcaatcattgtattcagccaaatgaacaagatgagcaaaagcagctggacagttggcagttcgaacacgctccggtacgatttttccacccagtctgtcggtgtaccgttaaaatcgtaatgcatcgcaatccggtccggaatccgcccgtagcacaaccatgtcaccaggaaagtggctgctgtcacgcttgcatggatcagaaaccatgcgttggaaaaaatgagtttctggctccggaatttcgggtcgaccatgaccgcctgctttttcccggttgcccagttccgtgccgccttgaccgctttcattttccggtgaaaataaagatagatgagaaaatcgccggcaatgtcggcaaagacttcgagagcgaaaccggtttgaagcaaccggcttgtgcgcacggccatgagcaaagcggctgccagaaggatactgaaggcaataatggctgcggcgtattgttttcttagttttttcagttcaggatccgggtaggcttcttccgggatggtgaccccgaaactttccgttcttcttgtgatatacggtgtcactgccatcatggcggcaaccagtccgaaaaagatcaatacgattacggtttccattgttctcccaccttttgaatatcgttgtatagcttttcgcacatttttaaaaaatgcttgtcgtccaggccgcggcagatcgcttcgctgataagcgggcgcagtttttccgcaaggctttcaagatacggttcatcggccgggggcatctgttcaggctggatgacaacccccttttgccggtggatctggataaaaccttcctgcttcaggatttggtaggctttattaaccgtgtgcatgttgacgccgaggtcggatgccatcgccctcacggatggaagcgaatcgcccggtgccagctcttttgacgcaatgccttcaatgatgctgttgtgcagctgctggtagataggaacatcagactcaagatcgattttaatgagcatgaacatcatctcttttatttgggttatttgttatatataatgtataacagttaacacaaaaaaacaagggatatttggtttgtttttctttttttcggcctgggatatagaaggcaaaaaatggcgagacactgcgaatggtggtgtctcgccgtttttatgtttgcctcgggccactttttttcgttttttaacttagactgctgcaagtttttcatcctgggcagggctaacgaaccaatattttcgttataagttaacgcagaccgcagcttaggtataggaagccgcccaaattttgaaatcggcaccccgcagagcaattgcaaacggcttattcaagaaaaaagcgggaaaaaaaagaggaacctcgggacgggttcccctagagcagattttctgttgtgttcacaagctgtttggcagcggagcggtccgggtcgaggcgtttttcgagccggcgcgcgagaatggaaagcaagtagttgacaacaaaatacataaaagctgccatgagcagaatcgggatgatgtattttgatccgccttccccgttataaatcccttttgcattatgcaacagttccggcagcgagatgatgattgcaagcgaagtgtcttttaacagtgagatgaactgactcacgagcggcgggatcatttttttcaaagcctgcggcaagataatgtaccacagcgtttggatataactgaggcctgacgaacgggcagcttcgatctggccttttgggatggcgttcaggccgccgcgcacaatttcagcgatcatcgcggattcgaacaccgtcagcgccgaaatggctgcagccgtgacgctcattttcacgccaacttccggcaaggcaaaatatgtaaagaaaataatcaaaatcagcggcaggttccgggtgatttccacaataagtgccacgattggcgataaaaccgggattttggcgtaacgcaagatgccgaggatacagccgatgagaaagctcagcacgattgcaacaaaagccacttccaatgttaccgcaaaaccctttagcaaataagccaggtttccgcttgaataagctccggcaaaatccatcacatttccctcctttaaatatgattcaactgcttctggccagccggcgttcaagatagttgacaagcaggctgagcgggatcgtcagaatgagataaaacatgccgacgaaaatatacgtatcaaaagtgacccatgttttttcatgaatgagatcggcgtaatacatgaggtcgagtcccgcaaaaacgccgaggatcgaagagtttttgaccaggttcaggaattggttgccgatcggcggaatgacgattttgattgcctgcgggaggacgacgtaacgcatcgcctgggtatacgtcaaaccggttgaccgtgcggcttcaagctggcccttgtccaccgattgaatgccggcacgcacggcttccgcaataaaagcggcagtgtaaatggagagcgcaatggtgcccgcgataaagccgcttaaattaatatgaaaatagctgagcccgttatagaaaaagaacccggtcaggattaacggaatattgcggacgacttcgacgtagactgcgccgataaaattcagcagtttcacgggggccagcctgaacacggcaatgatgttgccgagaatgaaactggcggcaaggccgatgatgctgattttaatcgtattgacaaaacctttcatgtataagtcgatattgtcggtgaggatggaaaaatcgagcacgctgtttcactcctttgcggtttaatcaggagaaagggatgggcgattttgcccaccccttatccttattctttgatccatttgtttttgattttgtcgtattccccgctgtctttcagttctttcaaagctttgttgacggcttttacgagtttcgtattgccttttttcatcgcgatgccatacggttcatttgtgaatgtcccgccaacgacttgatagttcggatcctgggcagccatgccgtaaaggatcgagttgtcggttgtcagcgcatccccttttccggatttcaaagccgtgaacgcctcctgatagttttcatattccagcacttgcgtatccggtgcggctttcttgacgttgtccccggaagttgcaccttttactgtcaatacttttgtgccttttgtcaaatctttgacgcttttaatcttgctgccttttttcacaaggagcgactggccggcatcaaagtaaacatccgagaagtccaccacttttttccggtccggcgtgatcgtcatggtcgcgacaaccatgtcaacatcgccgttttgcagcatcggaatccgggttttcgatgtaacttctttcagttcgactttgactttgtcaccgaaaattttcttggaaattgcttttgcgatgtctacatcaaagccttccacttttccggttttcgggtctttgtagccaaatagatatgtatcatatttgactccgacgaccaatttccctctgtcttcgatttttttgatcggatcatcgcttgcagagccgcctgtcgtttttgatttgccacagcctgcgaccagtgctgctgccaaaacaaaaattaatcctgttgctaaccatttttttacttttcccatttgaatcccccttttttatttatggccaccgcgaaagcaagcgctttgcggaagtccccaatgatgaatgattttgtgctggtgctgcctttggatgaagcccgggtattcccgcgggccgaacctgcggatgacgcacgcgcaattccctggcttatggccgctgctcccacgcgccatccccggatacgaatgtatatgcagatgcagatggtttatgaccgcgacgggtaccggctttccggcgattgacagccgccatgcatggaccaatagctgcacatggttttcacccgatttttggcatcctgcccgggcgtggcgcaggatgtttggctgccattcgtaaccggcatcccagcgattgatgccgccatacatggacccgattgtcgcacatggtttgcacccgatttttagcatcctgcccggatacaaatattttgcccgtggcctcatgattaatggttcagtacacggtttaagaaggtgcgggcgcgttcttcacgcgggtttttgaaaaaggcttccggtgtattgtcctcgatgatcctcccctggtccataaaaataacgcggtccgccacttcgcgggcaaaacccatttcgtgcgtgacgactaccatggtcatgccgtcttttgcaagtgatttcataacgtcgagcacttctccgatcatctcggggtccagggcggaggtcggttcgtcaaacagcatgatgtccggctccattgccagccccctagcaatggcgacacgttgctgctggccgcctgataactgtgacgggtaggcgtttgctttatccggaatacccaccctttctaggtagtgcatcgcctttttttccgcttcttccttgctttggcccagcactttgatcggcgccagcgtgatattttgcaaaacggttttatgcggatacaaattgaagtgctggaagaccatgccgatatttttgcgaaggtcgttgatatcggtttttttatcattgactttcatattgcggacgaagagttcgccgtccgtgatttcttccaggcggttgatgcagcggagcattgtgctcttccctgatccggaagggccgatcacaacgacgacttccccttcttttacttcaaggttaatatcttttaaaacgtgaaaatcaccatagtatttgttgacatgatggaatgaaatcacatcttcacctcccggctgctcatctttttggtgtgcgcttccagaatttagaaaccttccattactccctattttagagtatatcaatctattcagataacatcaatatttttattggaggtatttttctgttttttgaaatggatttttgggtgaggtattttttaaaaatattaacaatttcagaaatccctttagaagaagcctataaaatttcccgtgaagaaagcagcctgtttcatttattcactaaaaaagccattccaaaatgcttacccattttggaacggctggcgcacattgtacacattatgtttttttctttggctccgtactttggccggtaacttcaagaacatcaaggaagaacatcacaatgggaataccaagaatgagcccccacaaaccgaaaaaatgctcacaaaaaattaaaatgagaaaagtgtaaaaaacaggcatattcgtttttgaggacatcagctgcggattcagcacataggcttccacggcatgcacgatgacaatcaaaatgaggacatacagtactttcattccgccaccgatgctgtaagcgatgatacagagcggaatgagcgagatgaaaacgccggcgaccgggataaggccgagagcaaaaatgagaatggcgagcccgaataactgcggaaagccgagaatccagagaccgatcgtagtaagaacggaattcacaacggcgataatgaactgggcctcgatcactttcccgaatgtccctacaaatttgacaccgaaatactcgatttcatcgtaaaacgctgcaagtttgctctttttaaactgttttgtaaaacggatgatccgctctttttcaagcaggaaaaacaaactcaggataatggccatgaagacctggatgctgactttgctgatgcttgtaaaataatcgaacaggatagaaacgcctttttgtgcgtagtcgacaattttcttttcctggatgtttttcacaatataattcagtacttcattgtgctgaggttttgtgtaaaaatcggaaatctgcataacaagctgggtaatttcattgaccaggatcggaaaatatttgatcacgccgagtgtgaggccgccgagaatcaaaatatacacgattaaaacagccagtctgcgtttgatcggaaaccatcttgtcacaattttttgcagtctgttgacaagataggaaaaaataaaggtgagcagcatcaggtccatcatgctgcgcagaaaatacaggataagtgtgatcagcacaaagataagaacccttctgaccccccgtttttgaaataatgaaaacagccggtcttccatcgtattgttattaccccctccggattcaaaggaaccatttttctgtttacccttatcttaacacatttatagccggttcaagtaatttagccggcgagggatgtgtaaaattttttcctgccataaaaggaaataaaccatacagatgaatcagcccatggggagccctccgttcctgctgctatataaaaagaacttaagtttttcgcgtcaaaatcaattacgatcaggaaaattgaatccgtccccggggacagggcgttacggttgcattttcggcccgtgaaggtgtcaggggcggatgtttttcgctgttttaccgtgaaaagcgtttggaaaatggcggggggaatgcaaaaaacgggccgctgtgttttacagcggcttatggttatgatttgctttttttcacttgtggcttttcttcttcatcaatggcgtcgcgcacgccttttttgaattcgcgcaatgtttggccggctgcccttccaagctgcgggagtttcgacgggccgaaaattaaaagtgcaacaacaaggataatgagaatttcgccaaagctgagatttccaggcattttttcccctccccgggcttctttatctttatcttatagtgtattgtaaacattttcaacttataatcaccggaatacagtttattttcagattaggcaaggcggggttcgtaaaaaaatttattcgttttggccggcgtccatggtagaataatgtagtctggaggtgacgtttttgcatttgtggaatttgtttgtggccgcaattctcggtcttgtggaggggctgacagagtttgccccggtttcttcgacgggccatatgattattgtggatgacttgattttgaaatcgaatcatctttatggcactgaagcggcaaatgtatttaaagtggtgatccagcttgggtccattatggcgatggtggtcgtattctgggacaggtttttaaatttgctcggcctgaagaaaaatattacgagagagcagatgtacggtgaacggctgaaattgacgcatgtgattaccggtctcgttccggcggctgtgctcggctttttgtttgaagattatattgacgcccatctgttttcggtgaatacggtacttgttgcccttgtggccggggccgttttgatgattgtggcggatctcacgcgcccgcgccggccgaagacggagacggtcgaccaaattacatatagacaggcgtttgtggttgggctttttcaatgtcttgccctgtggccgggtttttcacgttccggttctacgatttcaggcggcgtcctgcttggcatgagccaccgtgctgcagcggactttacgtttattatggctgtgccgatcatgtttggcgcgagctttctttcgcttgtaaagcactggggcgccgtgacgcctgagacgattccgttttttattaccggattcatcagcgcgtttattttcgccttaatcgcgatcaagtttttcctcgcattgatcaacaaagtaaagctgatcccgtttgcggtataccgcatccttttggcgatcattttgcttcttttgatttggaaccgataagattttggctgcgcagcgttgcgtggctttttttttgcggggatgggccggggagccgggcatgctttggcagaaagggactgtgtgatgatccggctgtgtatcttggaaattgcgcggcgctgattttcattcttctgctggtgccgcgttcattgcggcatgggcgtctaattggacgaagcaggaatgcggggcctttgctttgtctatcctgaaaatatgcgccggctggttttcattcttctgctggtgccgcgttcattgcggcatgggcgtctaattgggttttccaattagacaaaatgggcgggcggggcctctgttttgtctaattaggcattctaattagcagtacgcaggggacagctcttcctttttgtctgtattagacttcccatttaaacattcctggcacgcccttgccctaaatattttcgatgctgtacgaaaaaagctgccagatccggcagcttttttactttttaaaatggtagggcattgttgcaacgacaacgtctttttcccatagaaggcgcatccggatgaggagcgcagactggttgtgcaaaatgttttgccagcgttttttcgggatgaattgcggaatgagcaccatgacctggtactcgttttcttttgctttccgctggataatttccaaaaattttgcaagtggctggacaatgctccggtaagacgagtgcagggtgacaaggcggacatcacaaccccactctttccacttttcttccattttcttctcgtcttcatgatcaaaagcgacataaacggcaatgacctgatccgagagcgattttgcataattaatcgtccgctccacgaccgttgtaatgccggccaccgggacaatgatcacattggagtggatttcttcctgaaacatgcctttaatccgcagctgctcgccgaccgcctcgtaatgccggttcactttccggaaaatatgcatgacaatcggcaggaagatcaaaaccggccatacttgcgtaaatttcgtaatgaataaaatcgcaaggacactaaatgtaataatggcaccgacaaagttgaccgacattttgccggcccagcccctcggcctttgagtgacccatttcacaatcatgccgcattgcgcaagcgtaaacggaataaacacaccgactgcatacaatggaatgaggcgctcggtattgccctggaatgccacaattaaaatcatggaagcaacgccgagaaaaataatgccgtttgagtaaccaagccggtcaccgcggatcgtgaacatgcgcggcataaatttgtcccttgccaggttaaaagcgagctgcgggaacgctgagaacccggtgttcgcagcaagcacgagaattaaagccgtagttgcctggacgaaatagtacaaaacaccgttgccaagtgtccggtgggccatttgcgatacaacggtttctgtttctttcggtgcaatgccgagccagtatgcgagaaaactgatgcccgccaaaagcgatgccagaatgatacccatcatggcaagcgtgcgggctgcgtttctcggtgccgggtcgcggaagttcgggatcgcgttggaaatggcttcgacccctgtcaatgccgaacagccggatgagaaagcttttaacaaaagaaacagtgaaatgccggcgaccggcgtaccgatatgcggatgcaggttttgcgggatttgccccgttactgttttgaataaaccgacaacaatgatgacaaacaatgagaatacgaacagataaaccgggtaagcgagcacattggccgattccgtcagcccgcgcaaattcagaatcgtaatgatcagaacgagaaaaaccgcaatctgcacactgtacggatgcaagctctgaaacgcggaagtaatggcatctgttccggctgagacggaaacggccaccgttaaaatgtagtccaccagcaaagatccgcccgcaagaaggccaggggtgacgccgagattttctttcgagacacggtatgccccgccgccttgcggataagagtaaatgacctggcgataagataaaataagtgcagccaataaaattaaaatgccgactgtaattggaatagaataccaaaatgccagcgcccccactgtggcaagtacaatcagcacctgttcaggcccgtacgcaacagatgaaagcgcgtcggatgaaagaatggccaatgcttttaacttggtcagcttctgcccttcaagttcatttgaacgaagcggtctcccaattaacaatcgttttatcgtggtgaacatttgaatggtctccttttatctgcagtgtttcaaaaatgcttcccctaaaataagaaaaaccacaaagagaattcatcttccctgtggtctattgcccgatcacagtttcacatcctctcttataacgctgacggggttagctgtcgggttcgggcataagagtggccctgccttttaaaaaaaggcttcaccccagagcggcgcgcggccgccaacctggttcccccgttccgtttccggattaagcggttcagttatgaaacacaaatttttcatacgacatcctatcttactcccgttgccatggtttgtaaagactatttcgcaattgcgtttcggtatgtccatctttacccgccatatccccgggcaaactgtctttattcacagtacctaattttcgatcatgcttcttttgtagaatatccgaatgtgcctaaagcacgcaaaaagcaaggtttttcggcaaatccggagtaaagagataaacagagttaggaaggtaaaacctgaggatgaaaagatgacctcttggggcaggcggatcaattggaaacataagaccaaaagaggcgcgaacccggtggaattgtctaattaggagctccattcgggcccgaaatgtccttttgaagccgtcaaaaagacaaaacgagcggcatcaggtaacgaaatgtccctttgaacctgtcaaaaggacaaaaagaagttgcatccgggcccgaattgtccttttgaagccgtcaaaaagacaaaacgtgcggcatctggtaacgaaatgtccttttgatcctgtcaaaaggacaaaaggagttgcatccgggcccgaattgtcnnnnnnnnnnnnnnnnnnnnnnnnnnnnnnnnnnnnnnnnnnnnnnnnnnnnnnnnnnnnnnnnnnnnnnnnnnnnnnnnnnnnnnnnnnnnnnnnnnnnggaatatggaaacacaagatccttttgatcctgtcaaaaggacaaaaggagttgcatccgggcccgaattgtccttttgaagccgtcaaaaagacaaaacgagcggcatcaggtaacgaaatgtccttttgatcctgtcaaaaggacaaaacatgccgcatccgggaacgaattgtccttttgaagccgtcaaaaagacaaaacgagcggcatcaggtaacgaaatgtccttttgatcctgtcaaaaggacaaaacacgccgcatccaattggacaaattaggcgaaaacccgttgaaaatgtctagttaggcgttctaattggacaaatccaagcgtaaaacccgttaaaaatgtctaattaaggtctaattaggcgttccaaacgccaaaatccattacgatcaggatagatttgcttatggctgtccggcgcaccaacaaagaaaaaaacccgcaagttgcgggctttttttaaaacttaattttttcttccaaaaaggctttaagttccgtgattggcacgcgggtttgctccatggtgtcgcggtcgcggacggtcaccatgtggtcatcgcgcgaatcgaagtcgtatgtgatgcaaaacggcgtgccgatttcgtcctggcggcggtagcgcttgccgatcgacccggtttcgtcaaaatcaaccataaacgttttcgacaaatccgcaaaaatgtcgcgtgcttcatccgataattttttcgataacggcagcactgcggctttgtaaggcgcaagggccggatgcaaatgcatgaccgtgcgggttgtgccgtcttcgagttcctcttctgcataagagtcaatcaggaatgccagcgctacacggtccgccccgagcgacggctcaatgcagtacggaacaaagcgttcattcgtttcctggtcaagataagtgaaatcctcgccggaatattccatatggcgtttcaggtcgtaatcagtacgggaggcaatgccccacagttcgccccagccgaacgggaagttgtattcaaagtcggttgtcgcattcgagtaatgggacagttcttctttttcatggtcgcgcagccgcaagttttcttccttcatgccgagattcagcaaaaattcgcgcgcatattgtttccagtagtcaaaccatttgagctcctcgcccggcctgcagaaaaattcaagttccatctgttcaaattcgcgcgtgcggaaaatgaagttccccggggtgatttcgttccggaaacttttgccgatttgggcaatcccgaatggcaattttttgcgcattgtccgttgcacatttttaaaattgacgaaaatgccttgtgcggtttccgggcgcaaatacagttcattcgtgctgtcttcggttacgccctggtatgttttgaacatcagattaaactggcggatgccggtccagtctttgctgccgcaatccgggcaggcgatgtcatgcgttttgatcagctcttccattttttcaaacggcaggccgtcgacaatcatgtcgatccctttttcatgcagggcattttcgatcagcttgtcggcacggtgccgggctttacaatgtttgcagtcgatcatcgggtcattaaaattgccgaggtggccgcttgcttcccatgtgcgcgggttcatcaggatcgcagcatcgaggccgacattgtacggcgactcctggatgaattttttccaccaggcttttttgacgttgtttttgaattcgacgccgagcgggccgtaatcccaagtgttggcaagccctccgtaaatttccgaacccgggaaaataaacccgcggtgtttcgcgtgcgagacgatttgatccatcgtgacgctcattgtcatctctccttttttcattgaaatggtttcccctggggacgggaatgtttccatataaaaagctcccggctccaggcaacagcctggggacgagagcttgaattcccgcggttccaccccagttgatgcggaatttccgcacccactttccatgaaaaaactccggactgccgtttcaccgggttccttgccgggcttccaccgcccccggctcgcttgaaaaggaaaagttccggctactattgatccttcatcgtcgctatttgaatagaaatactataccaaaaccgggcaggacaagtcaatgcccggcttgctttggaatgaatatctgccatactttgcaaaccttctatttttgttgaaatatccgggcggccgtactgctcctgtccgcctttccggccccaaaaaggcacgctttgtctttcaagtcgttttttttacatttcatacaaaagagccccggttaattgggattggcaatttgaaacaaagtcagcttttgttccatcaggtttaaaaccgggtacccttcgactttaaggacaggctggtttggatgaagcggatggatccggataatgctcccttttatcccgttacggagtgtaatcggttgtttccggtaattttccatcaggaagttggcaaacgggaggacaatttcccgatcgagccggccggcatcagcatctgccattaattcgtcaatcgcaaaaaacaccggctgcctcctgcggtatgcgcggttggagcaaatggcgtcaaacgtatctgccaccgatataattccgacaagaaaaggaatggttttcctgccatccgggtagcctgagccgtccagccgttcatggtgcatcaggaccccttttaaaatcatcgggtcgagcgatgttttctcaagcagccggtaacccgcttccggatgcttcttgatcaaggcaaactcttcgtctgttagtcttcccggtttattaagaatttgcgggtcaatggtgaacttgccaatatcgtggaaaagccccatttgcgccagcaggctttgcttttcgggatgcagcttcaaaattttcccgatattggcagcgatcagcccgacatggatacagtgtttgaacaaatattcgtcagcggagaaatgctccattagttccaaaatagacgtccgggtggcaaacacttctttgtaaagcttgcgaaaatttctttccatactctccacttctgcatcacaaagggttgttttcacttgaatgatgtgctggagttcttccatttcatggtaaatattctcatataataagtcatggaagatcccgtgcgcttcggtggcaatgcgcctgccgtccagttccggatcgcggatgacttcatatttatttaaaatggcagcaagcctttctgtaagaaacgtcccttttcgcagcaacaggacgccgctattggaatacaaatcttctgctaacttttccccttttcgaaacaccattgaaaaagctccccttgaacgtactttttttacattttaacacaggaaatgttagtgagaggaagcctttccgatttttcttaaaaagttcatttatgttccgctacctgccaggcatcccattgcaagcgggtgtcagttttccaccgcactttcctgtttcagaaaacgtacgacttccgcatagtttcccgtaacgagcgccgggttttgcaacaattcctctattctttttgtatcatccgtttcgacgagaacaaatccgggaaacgcctgcagctggatcagcggattgatgcggcggatatcttcatattgataatgcagctccaaggagacatgatccatttcaagaaacggcacatgctcttcttcataccactcttcatctgtcacaacgatcaaagtataatagcgccggttttccgctgcccgtgaatgacctttttcactgatgatccggtcaacgcaaatcaggccacccattatgatgaacgcaaatacagcgtacagccataaatgggacaacaacagcaataccgctgtaatcaacgaaaggacactcaacctttttgccaccatttgaagcagtaaaaggacatcactcatcattcacgtctcccaattcatgatgtaaaaaatactttcctatatgatatgcctgcatggttgaatcggtgcttttcgttttcgtttttttgcagattggaacataataaaaaagcgaaagcaaacaggaaaggagcactaccatgagcaaatacgataaactgtttgaatccattacgtttaaaagcggcgtcagggcggaaaaccgcatcgtgatggcgccgatgacccattattcctcgaatgatgacggcacgatttccgatgctgagctgcgttattacgcggaacgtgccaaagggccagggatggtcgtgacggcatgtgccaatgttacggaaaacggaaaagcgtttaccgggcaacccggcgcgcatacagatgaaatggttgagagcatgaaaaaactggcgcaaacgattcagcaaaacggcgcaaaagcggttgtgcaaatccaccatggcggccgcgaatgcccggctgaactcgtgcccggcggggatgttgtgagcgcgagtgaaacagattcgtcagacggcagcgtccatgcgcgcgcgttgacaggagaagaaaccgctgaaattgtgaaagcattcggcgaagcaacacgccgcgtgatcgaagccggttttgacggcgttgaaattcacggtgcaaacggttatctgattcagcaatttttctccccgtatacgaaccggcgtgaagacgagtggggcggcagcctggaaaaacggcttgcattcccgcttgctgtcgttgatgctgtgaaaaaagcggtggcggaatatgcagaccggccgtttttagtcggataccgcttgtccccggaagaaccgtacgaaccgggaattacgatggatgacacgttcgcgctgttggatgcgctgatggaaaaagagctcgactacgtgcatatttccctgcagcatttctggtctaaagcccgccgcggcggtgaacccggccgtccgcgcatggaacagatcgtggaacatactgcaggccgcgtgcctttgatcggcgtcggttccctgcacacaggagacgaggttttgaaagcaatggaaaccggcgtgccacttattgccctcggccgtgagcttgtcatggaaccgcattgggtggagaaaatcaaagccggacaaaaggatgcgattcaaaccgcgttacaaaaagacgaccgcgaacggctcgttattccggaaccgctgtggaagatgatcatctcaattccgggctggttcccgtttgcagagtgacatctgcctgctgcacggcattgctccgcctgccgaatctggcctaaggctttagcagcttagtttggcacacattgctgcgggctttagcagcttttgcgcaacttacggcatgcccggactggttcccgcaaacaccgttaacatgcaggtttctgcctgctgctgattcagaaaaccgacccattttaaaaaataggttcggttttcttgacttttttcacttacaatattaaactaagttacgaaaagtaagttttaaaaacaggaggaattcatgatggcaaaaacaaaatgggcagttgactatgcacacagcaccattgattttacagtaaaacatatgatgatttcaaaagtaaaagggtcttttcaaaattttgaagtcgaactcgaagccgatccccaggatttaacggatgcaaacatttcttttattgttgatgccagcagcattagcacgaaaaatgatgaccgcgataatcatcttcgttctgcagatttcttagatgtcgaacaatatccgaaaattacatttgtctccaagtcggttacaaaggcaggaaacaatgaatataacgtcaccggtgatttgacgatccgtggcgtgacaaaagaagaaacatttaaagtcacatttgaagggatttcgaaaaacccgatgagcggtgcggaaaccgccggctttagtgcagaagggaccgtaaaacggagcaactacggccttacttggaatgcagcccttgaaacaggcggtgtcctcgttggcgatgaaatcaaatttacggtggaattagaagcaagcaaagcagaataattgcggaagcgccaatttaaattggcgcttttttctttggtcagatcatgctgcttaggccaaggatcagttgaagctactgaaaaagcctaagagaaaacaaaaaatggcgagacaccaccattcatagtgtcccgccattttttgcatccttgtataaataaaaataaaacatcattttttcagtgctctcaatcacttttttctattaaataagaacttttctcaattgctgtgatgtgcatcacaaataagcgggtgctgatggtttatgatgaagacagcaatgaaatggaggagtgaattcgatggaacgttttacaacaaaccagactgtcggggaaattgtaactttatttccaaaagcggcggatctgtttaaagcaaaccgtattgatttttgttgcggcggcaatgtgtctgtgaaagaagcagcggaaaagcgcaacctgtcagcagatgaactggttgatgccatttgcaacctttatggccaatatgccggaaaagccgttgggcaaaattggaatgaagcgggctatacggaaattgtcaaccacattcaggccacccaccatgcgtttttgcgcgaggagctgccaaatttgagcccgtatgtgacaaaagtgatgcgcgtccacggcggcaaccacccgcatctcatcgaagtgcatgaactgtttaaccaattaaaagcagaactgctggcgcatactgaaaaagaagatgctgaacaatttccggccattcgtgcatacgaaagccatccatctgccgctaacctgaaagccgcgacagccggtttggccgatcttgaaacggaacatgccgctgtcggggaaattttgcaccagctccgcgaaattacaaatgactatacattgccggaaggggcatgccgtacattccagctcgtgtaccaacgccttgaaaattttgaaaatgatacattccagcacattcacctggaaaataatattctattcaagcggttactcgaagaagccgtttgacttttaaaaggctgtcctcccaggcagccttttaaaaaggggcggtttgctttttatttttctttcctggccccggggaaggacaactcgttgcgcgtgcgttcctcttttgtcgttttaagacctccaaaaggacagtttgctcggattccagctctcttttgtctttttgagacctccaaaaggacaatttgcccggatcccagctctcttttgtctttttgagacctccaaaaagacaatttgcctctggtccggctttcttttgtctttttgagaccttcaaaaggacagtttgctcgggttccagctttcttttgtctttttgagacctccaaaagaacagtttgccaatggtccggctttcttttgtctttttgaaccccccaaaaggacaatttgcccctgatccggatttcttttgtctttttgagacctccaaatggacaatttgcctctggtccgactctcttttgtctttttgagacctccaaaaggacagtttgctcggattccagctctcttttgtccttcatagtcgcgatgaaagacatttcgctgcctggacgccactcttttgtctttcataactccgatgaaagacattttgctgcgtgggcaacccccttttgtctttcatcacctcggtgaaagacaattcgctgcgcgggcacttcacttttgtctttcatagctctgatgaaggacatttcactgcccgggcgccccttttttgtctttcatcatcccgatgaaggacatttcgccccgcgaacgccccctttttgtctttcatcatcccgatgaaagacatttcgctgactcgggcgccccccttttgtccttcatcaccccgatgaaagacatttcgctgcctggacgccctccttttgtccttcatagcctcgatgaaggacatttcgccccgcgaatgccactcttttgtctttcataactccgatgaaggacatttcactgcccggacgtcccccttttgtccttcatcaccccgatgaaggacatttcgccccgcgaacgcaactcttttgtccttcatcaccccgatgaaggacattccgccccacgaacgcccctcttttgtccttcatcaccccgatgaaggacatttcgccccttggaggcccctcttttgtccttcatagcctcgatgaaggacatttcgccccttggaggccccccttttgtccttcatcaccccgatgaaggacatttcgcccctcggacgccccccttttgtccttcatcaccccgatgaaggacattttgccccgcaaacgcttctcttttgtccttcatcaccccgatgaaggacattttgccccacgaacgcctctcttttgtccttcataccctcgatgaaggacatttcgcccctcggacgcccccgttgtccctcataccccgatgaaagacacttcgctcccacgacggcccccttgtctgtctttgctttaattcttaccggcgggagaattcctcataccccgagcagttcctccgtcagtttttcctggtgaatgaaatatgtgcctttttcctgcgggaggatgaggtttttttctttaagctggcggatcgtgcggctgaccgtttcacgggtgacgccgatcatgttggcgaggtcggagttgttgagcggggttttcacgaggacaaacccgtctttttcctgaacgccatgtgtgcgggtgaggcgcagaaaaagtttgactacttgctcgtaagcgttgtttaaaatctgggcttcgaggcggtcctgcaagtcaaggatttcatcactcatcacaccgtataaagtcatggtcagctgcggattgttgagcaacacgttttcaaaatcagtaatccggatggcaacgagattcgtgtccacaaccgccatcgcattcgccgggtagcttattttacgaaaaaaaccaacatgcgggaacatgtcgccatcgcgaagcagtgtgacaacttgctctttgccgttcgcatcggtgcggtaaattttcacttccccgctttcaataaaataaacggcctcctgcgggtccccctggaaaaaaatatgcgcatccttttcggcatgctttttaacagatatatcggcgatcacagccagatccgcatccccgagtcctttaaaaagtggcattttacgcaggttttccaaagcgctcacttcctttctttaataaagtgcaattactcgcgtattctccaaatttcataggtatcattccaaagctgcaggcggcctgctggacaaatcctttcaacacaccctattgtacacaaaaattagcacaccgcccaaagccaaagtcaatgttaaaaaaagaagagcgtcccactcggagcgcctcttatcctttcttcaacaaagtgcaattatccctcaattactcgcgtattctccaaatttcataattttcattccagagctgcaggtggcctgctggacaaattctttcaacacaccctattgtacacaaaaataagcacaccgcccaaagccaaagtcaatgctaaaaaaagggtgtcccatccggagcgcctcttatccttccttcaataaagtgcaactatctctcaactacttgcgtattctccaaagccaatattaaaaaaagaagagggccccaatcggagcgcctcttattaagaaggaatcgattctgtaggatgggcagccgtttccagtgcttcctttttgtcaaattctttttcggttttggagatgacgaccgtcgcgacggcatttccgataatatttgtgagcgcgcgtgattcggacatgaaccggtccacgccgatcaacagtgcgatccccgcaaccgggataaccgggaacgcagacaaagtcgcagcaagggtaatgaaaccggaaccggtcacgcccgccgccccttttgatgtcagcattaaaatcagcagcagcatgatttggtgcccgatcgtcaggtgcacattgtacgcctgcgcaatgaaaatggaagccattgacaagtagatggcggtgccgtccaggttaaacgagtagccggttggaacgacaaggccgacaacggattttgagcagccgaatttttcgagttttctcatcagggaaggcatcgccgattccgatgaagaagtcccgagcacgagtaaaagttcttcctttatataagcgatgaatttgaaaatattaaacccaaacgctttcgcaatcccgccgaggacaagcacgataaaaatgatcatcgtcaggtagacagatcccattaattcgccgagattgatcagcgagcttgcgccaaactgaccgactgtataggccattgccccgaatgcagcgatcggcgacactttcatgacaatgccgacaattttaaagaagatttccgttatgtcttcaaaaaagcggataaccggttttgccctctccccgagggatgcggcagcgaccccgaacagtaccgcaaagaataatattggcaaaaggtctcccttgacaaaagccccggcgatgctttctggaataataccggaaataaaaccaataaaaccgtgttcgttgtcttttgcctgcgtgacgaattgtgaaacctggcttgttttcgcatggcttgtatcaatgccgtggccaggctggatcaaattaacgataaccagaccgatggcgagcgcaaccgtgctgacgacttcaaaatagataagcgccttgccgccgatccggccgacttttttcaaatcccccatgccgccgatcccgataataaccgtaaagaagataatcggcgggacgagcattttgatgagtttaataaaccattgcgcgagaatattcagttctgcgccgaatttaggtgaaacaagccctacaataatccccagaatgatgccaatcacgacttgtactgtaagattccgaaagttgatcctcatttgccatcccctctgtttgcgcttacattttagtgtcacgaattatatttctattatagtacaggtttctcccgttttcactatttttatattaaaaaaattttgcttttaaaaaagcatggtctaaacaaaacgcaaaaagcagcggaacagtgtccgctgctttttgccagctgtctttgaaagaatgctgggaacgtatactcccaatatgaatagtcgccaccagggtctgtgcctttttccgggacaagtttatacttccggtaccgcttctcgcaatgcttcttccaattcttccctgtacgcctgttctgtctccgcatcccaggaaaattcggcggccaaccatgtcatgaccggctctttccatttgcggacccagttgatatcaaagaaaagggcaccggtacggcgaatgaagaaatcgaccggttttaccgccatttcttgttccactgcgtatttcaatacggcgtacacttcccgcggcagcggatagtcgtctttccagcttttcgcgtatgcatatacgtgatccgcgttcgtgccatatttttccgcaatcgcccggcttgcttcagcagacaggccgcttgcttccccttcttttgattttgctttgacaaacgccggcaatttttcagagccgcctacgtcaccgccggaaatcggcaagtgcttcgtttggcacggccggaaattgccgccaagcctgcgcgccacaagatctacaaccgtttccgccattttccggtagccggtcagtttgccgcctgcgattgtcacgaggccgctttcggattcccaaatttcatctttacgcgaaatttcggaggcgtcttttccttcttcgtaaatcagcggacggacgccggcccagcttgattcgacatcatgggctgtcactttgacttccggaaacataaagcggatcgctttcaataagtaatcaatatcttccgggagcggtttcgggtgaatcgggtctttgtcgtaaaatgtatccgttgtgccgacatacgttttgccgccgcgcggaatggcaaacaccatgcggccatccggcgtatcaaaatacacggcttgccggagcgggaagatgctttggtcaaacacaatatgcacgccctttgtgaggcggaggcttttgctccctttcccgtccttattgcgcattttatcactccacggcccggtcgcattgacgaccattttcgcccgcacatttacggtttccccgctgatctggtcacgaacagtggccccgcagatacggccgttttcatacaaatactcttccgcttttgcatagtttacagccagcgccccatgtgcgacagctgctttcatgacttcaatggtcagccgcgcgtcgtccgtccggtattcgacataataaccgccgcctttcagcccgtcttttttgatcagcggttccttatttaaggtttccgaagccgacagcattttccggcgttccgtttttttcacgccagctaaaaagtcgtacagccgcaagccgatattcgttgtaaacgcgccgaacgtgccgcccttatggaacggcagcagcatccattccggtgttgtcacatgcgggccgttttcataaacgatggcgcgctcttttccgacttcagccaccatctttacttcaaactgcttcaagtaccgcaggcccccatggacaagtttggttgaccggcttgacgtgcccgccgcgaaatcctgcatctcgacaagcgctaccgacatgccgcgcgtcactgcgtcaagcgcaatgccggcccctgtaatgccgccgccgatcacaagcagatcgaacgttttatttttcatgccttgtaaaaccgtcccgcgctgttttcctgaaaattccattttcgtcccctccttaaaataaaaagagacctgaaacatgcattatggaaaactcccataaaacaagccaggtctctctgcatctcttgacattttatgaacttgtttttattataacagaccttccgctgattttcagctgttatgcaccgggaaaatgtagtaatccccgtttcttgccgttgctccgttagataaggcagcgcatcaaaacatagaaggcaatggcgcccgaatcatgcgaggcaacaaagcaatagctggccacgtttcccgaaagctgtttaaaagtccaatagacaagcacaagccatcgaaggaaaaccggctgaataccgcattttctgcagtcacatccggatggccgggaatccaaggtgctgtgaaaaccgaaccatagcaatctattgaaaagcagtggccgcctgcaacagctaaactgccacaggacaagccggatcaaaccatgccggctgcagcaagaacggcagccgaaatgctataaatctatttaaaggcaatggttgcgtggattgcttttttccatccgccatataaggcttcgcgctctttttccgcgagtgacggttcaaatttgcgttccactttccactggcgggcaatttcttcacgcgattcccagtaaccgaccgcaagccccgccaaatatgcggcgccgagtgcagtggtctcgctcacaaccggacgttcaaccggcacgcctaacatatcgctttggaactgcatgagaaaattgtttttcactgcgccgccgtccgcacgcaatgttttaagcggtaatccggaatctgcctccatcgcagcaagtacatctttcgtctgataggcgagcgattcaagcgtggcccggataaaatgttctttcgtggtgccccgtgtcagcccgaacaccgcgccgcgcacatcgctttcccagtacggtgtcccaagcccgacaaatgccggcacaacatacacaccatctgttgaatcgacccgctctgcatacgattcactttgagcgctgtctttgatcatgcgcatcccgtcacgcagccattgaatcgctgaccctgccacaaagatgctgccttcaagggcatactcgactttaccatcaataccccatgcgagcgtcgtcagcaagccatgcttggaagaaacggctttttcgccggtattcaaaagcataaaacaaccggtgccgtacgtatttttcgccatcccttcttcatagcaagcctgcccgaacagcgctgcctgctggtcgcccgccacgcctgcgatcggaatttcctcaccaaagaaatggtacggcgcagtccgtgcataaacatgggaggaaggcttgacttccgggagcatcgcagcaggaacgtccagcatttcaagcagctcgggatcccatttcaaatcgtaaatattgtacaaaagcgtccgggacgcgttcgaataatcggtaacatgggctttgccgcctgaaaatttccagatcagccaagtgtcgattgtgccaaacaggagctcgcctttttcagcgcgttctcttgctccgtcaacatggtcgaggatccatttgatttttgtcccgctgaaatacggatcgatcaggagcccggttttttcacggaccatatcagcatagcctttttcttttagatcggcgcaaatatccgctgtctgccgcgactgccagacaatcgcattgtaaatcggatgcccggtttgtttatcccagacgaccgttgtctcacgctagttggtaatcccaatcgcggcaatctgcttcggctctacatccgcttctgttaaaacagtcgtcgtaactgcgagcaccgatgcccacacttcattcgcattatgttccacccagccaggttttggaaaatattggtgaaattcctgctgggctgtatgcacaatttcccctttttggttaaaaagaatagctcttgaactcgttgtcccctggtcaatggataaaataaatttctccatcccgtttcctccttacgctctctttttcttgttttctatcatccatactatcaataatacaagtaaacacgttagcaaaacacaccaaaacgcgggcgtccaatcatttttaaacacagcccggtaaaaaacgcccccgagagaacccccgagcaacggaccggcaaccggcacccacgcataaccccaattcgaaggccctttccctgcaatcgggagcagaaaatgggcaattctcgggccaaggtcgcgggcagggttgatcgcataacccgtcgtcccgccaagtgaaaccccgatcgctacaatcagcatgccgacgatgaacgggttcagcccgtctgtaaacttatttgccccgatcgtaagaacgccgagcacaagaacaaaggtcccaatcatttcactgataagattcgcaaaatagtttggaatggccggcccggtcgaaaatacgccaagtttggctcccggatcgtccgtctccttccagtgcggtaaaaagtgaaaaaatacgacggcagcgccgatcatggccccgaccatttgtgccacaatatatccggccactttcgaccatggaaaatccccgttaaatgcaagcccgacggtaagtgcgggatttaaatgggcaccgctgtattttccgactgcataagccgccatggcgacgccaagtccccacccgaacgaaatgacaatccagccgctctggtaggcaaatgactttttcaaattgacattggcacaaacaccaccaccaaaaataatcaggatggctgtgccaaccaattctgctaaatatggattcataccccttcctccatttcgaatgaattaaaagctgatccggcaataatccggtccctttcatcaaaaaagaacaaaaagacccacgacgcccgcaaatttgttgcgaatggagtggatctctttgttctcctgccaagtttattaacttatgtatgatgataacgcttactttaaattttgtcaatccatgttcacaaaaaatatatgcggattttcctgattttgttgaaagaagcgggcacccttctattccgaaaacatttccattattcggctggtgcccattcggcaccaatgggagaatgtttcacatacctgaagtccgcttccgcttctggtttgggcttccccggagtcatgccaatatgcctgctgtacacccgggtgccgccccatgcaaaaaaacgctgcggccgcccggaacagccacctgtcgttatttcttttccaaaaaggcttcccacaattccgtatccgaggtggtgatgccttctgctccggctttcaatgctttttccacatcttcccgcgtacggatcaacccgcctgcaaaaattggaatgccaagccgttcttttacttcggtaatcatccatggcgcgatgcccggcaaaacttcaatatagtcaggtttcgtccgttcaattaatttgtaactttattcagtttaggccattttccacgtgtatcgtgtatcacgtgtatattgtatatgatcgggttttaaaagcaacagctatatatattttgaaggaggtagagaaagatgacaagaagcgggattataagtgcaattattggctttttagttacaggcattctaatagcttttatggaaggtaattgggtaaacggtttactcgcttttggtgtcccgtcagttgtttttctggcggttgaattaaccaaaaaaaggacaagaaaattgagtgatctaaacttaccagatacggatgaacgagtgtccgggtttttccagtttcaggatagtagttaactgctaatcggcaacgcgaatcggtgtaacaacatctacgactcgtcctagtaccacaccccggaataaactgaggtgttacttcttgaccttgtttcttatttttgtccattacaaacttcaccacctttctcaatataaagtgaaattaatgaggaaacactaaaaaagctaaggatttttgtataaaaatgtacaaactccccccgtcgacaatatatgaattccccactgtgttaaactccctcgttctgaatgtttgcatctgcggttttacatcgtaagggacgccaggttgaagcctttgattaaagtgaaaaggctcccatttagtgggctccttttcattaaagagatggtactcaaccgatatatgcgttgatgacgtaatttgcgaaatcttatgattttgagtataattgattcatggtgagtcctccctgagtatcaattaagggcccattttttctttgatgctttggacaccatctatcgtatcaggggggctcatttttgtgcaaacctcaaatttctttgattacatgaatgcttagtatccatatttataatgagttttacatccagggacaactaaatattgatctccctttagagcgtatgcagttcctgttagataagctgtggcacctttagttttagaaattggaatcgtatccgatactgaactaccgagtgccccaactccacttatctcataaattctgggtgtatgtccgctgtcatacactacttttattgttccatcaaagtaatatggccatttcgtagctggcttgacgtaccagtataattgacccccgccaacatatgttatcttagatataccacctgaaccatattttgtattgagttcaggatctgtagggataaaaagaggatttgtttcagaaacagtggagactgaacttgtcgagttaccttggtcattgagatcacttgttgcattgatagttatttcgtcggttgaatccggtgattctgcaattgctggtttgtttccgataaaaccagaaaagaaaagagctaggacaataacagcaaggataaaaacttttttcatacacacataccccttttgatttttgttgtaataatataaaaattataaatgaatcagaagtggataacaagtaaaattcattacagaaagaaggaatattgtgatcaacgtaggagatgtgatttcttataactttaattttttaatctatattcataacgcttataccaatttggaaaatgaaggcgataagtttccttatctgcctcttgaaagagaaggttttattgataggaagtctttcttagaaaagggtaaagagatatggggggaatgtttgcgttcaaatatacaggaagaagatatacaatattggttagcgaaaaaatttgattttcgaggtttattttccaaaaatgattatggtgaaaggaattatcgattgttgcgaaagacgtttaattgttggtttggggaaatcggatatcgaagcttagaattgcagggagaagtatgggtaccctatgtttacgaacaattggctaaaaataatgaaaaagatgattgcaatatttttttggaaattatctttgatgaggggcctaaagagtggaaaatatattctgaccagcattactttattacgatccacgatcatccaatgaatggatctcatattctgctcgatatatttaaaaatgattgaaaaatattgggtgtggcatattcgtcatacctctaaaatcccgttcaacccatatggatcaagtagctgtatccaaaatctttcccagttccagttcccaactgtgttcgtgctgcaagctaccaaaataaagacgttaaaaacctgccagtacgggaatgggaatgtccgaattgccatatccgccatacaaaccgggatttgaccgcaagtatcaatcttaaaaatgaggtcataaggcttctaaccgtaggaactgcgggaattgcctgctaaataaatattcaacaaaaaagagaggggaaattttgtgaaaaaatatgaaggaatatcttttgcgctcttcattttttcggcattggtttatttaacggctttccgaaagaagtctcccatcctcaaggaatgtgaaggtgcgaatcgcaccaatgagtaggtgggagatgaatttcggttggctttagccaaagttatttttccaatccttttctcaacaattctaagattgcggctgttctagttggaatcccattttctttttgatattgctccaatttttctaatatcgtcttaggnnnnnnnnnnnnnnnnnnnnnnnnnnnnnnnnnnnnnnnnnnnnnnnnnnnnnnnnnnnnnnnnnnnnnnnnnnnnnnnnnnnnnnnnnnnnnnnnnnnnaagtggagggtagttcactttctaaataaaggataaaaaaaatgaaaaactattagctgaagcttatcaaaaaggagatctcaataccatcagcaaattaaatttggcttttcaagattttcaaagaaacgttcaattttatagagcagtaagatacgctattggaattttaaaaatatattcaaaggattacgataagcgagttaataaacgaaataatcgaaacctgttgatacttgataaaccgattaacaaccatgatgaatcttctgcaacaccaatggtagatcttattcaagattcgcgtcaagaagaagagttattcaaaatcctgctacaaagtaatgcttttgactttaaaaacgaacgtttggaaagggctttctttccccttccctataaacagcggcgattattagaactaaaatacgtagaaaactacagtcaaagggaaatctcgaacataattggccaaacagagaaaaatatccattattggcataagaaaaccataaaacaacttcaaagtcagttgagtctttaaattggcggtgataaagtggggaaaagacgtgatacagaaaaagaaattgaaaggatattgaaattaatcgagcctaagaaaaaatactatttaagggaaactaacgtaaatgaacgagacgatctatcccaagaattggacatattgatttatcaaaaattggaaacatatcttgataaagagcctttaactttttttcagtatttaaaggagaatgaagccaaatggaagaagaaagaataaaaaagaggccttctcaaaagttggcaaatggatgataagattccatcttctttaaacactgtaatcatgggttgttgaaaattttaagattcaattgtttacaattgcgatatgcatctttttctaatgagtcttgtgaattttgtgatctttactgtccaataacataagtaaagaaacgttctcccagtggaggtaaattttggatttgccagatgaaacagcccattatcttagggcttgagcaaaattcctagatttggaaaggtcgctaacagctttggcaaaaaaatataatgcaagcgttttacaacaaatccaggggagaccaagtcaagtattatcgcaaatgggttcttttaaagttcgagacagagcttgctgacaaatggggtacaaactcagaattggatacgtccagcaagtcctgtctcatgaaccaggggaaaagaactgtgccttcgtacacaaaaccaccaagacaactgccttggtgatatcaataaacaaagctaaaataaagaaaaatcaagatcaagcaaacagtaccaactttttgcctagctgcaacttttttataaaatatctatgataaggtaaacaaagaaataaaaggctaagatgaaaaaagaaatatggacatgatcgaaagttgcgaataaaagaaccggtagaaagatcaaaagccaaatataagtactcctccatattttaataaacttttccataagttccccctatataaaaggtatttccttttttctaatgtttctgcaccccatcccaaaactcctgctaaatttcgcgaacaaggatgtctgtttcgccacaccatcactgatttaaaaaaaaacaagccccccctttgaaagccgtaaaacaggtggaaaggtccctgccatttgcttccgcatcgtaaacatgatcgaacgtgcatgcaagtttacttcctggaaaagattacggccggctaatgcatttggagcagccggccgttgttatcctgtttcctattccttaacgtatagagcctcaggcactttatctaaaagcggtgtaaccggaccgttgctgacaagggcgaggtggtgcattgcccgcgttccgacggtgtatagcagggtgcgttctgcttcatctttatacacagacgccgaagcatcgagcacgatgacgctgtcaaattccagccctttcgcaagataagacgggatcaggatgatgccttccggaagatcgctgtattctttttcaataaaggtcagatccagttcttcccgcaatgtttcatacgcttcggcacactgtttctgtgacttgccgatgatcgcaactgtatggctatcttttgcatattttttcgcaaactgtacaacttttgccaaagcttcttcgttgccgcgggccgccgcgacaaccggcaaatcgccttcacgttcaaaccattcaatcttctccccgcccgctaaaatttctttcgtaaagcgggtgatctgggcagtcgagcggtaacttttcgtcaagtatacgacctgcgctttttcttcgccgaaaatctccttgatcagctccatctgcgaacggccgcttgtgccgaatatggactggttcaagtcaccaagcatcgtaaacttgctgtacgggaacaaatagcgcaaataggcaagctggaccggcgaataatcctggatttcatcaataaacacatatttgatcgaactgctcgttgctttgcctgtcaaaaggtcaaagagatacaaaaacggcacggtatcttcatagggcagccagccttcgcggaaagcggcgcgcgtttttgcatcaagccgttcttccgcaccgggaacaaattctggtccgcgccgtaaaaaatccagatactgggcacggatatggagataatggaacgttttaatttgtttccggatcgagctgaagcggcggttgacgattttacgcgctaaaaattctttttcatcatcggccccgctgaacgcatcattgttcttgcgcgatttgcgctcggcatattgatgggcggcaagataggcttccgtcccgagcagttccatttcttcttccacccatggctttttccgctcttcttttgcaatctgttccagttctttcagcagctttttgctgacaagctgaaaccggttcggcagcgagtagctttgatcataggcataaaacatctccgcaattttttccttcggcacgatcgtctcgcctttaaaacggatatcgcggaaaatgatgccgccgtttaaaagtttttccgcataatcccgaacggcatggaaaaatgcaaggctgcctttgattcgtgcttctttcctgttttcggctttgccttcgagcgcttcttccatttgctcgagcaggctttcgacttttagctttttgccagcgcgtgcctgggcaaactccaggaaagtcgtctgctgcatattgttttccccgagctccgggagcacttttgacacataatgattaaacagctggttcggcgaaaataaaacaatttgctcggaatggagcgaatcgcggtaccggtacagcaaatacgcaatccgctgcagggcaaccgatgtttttccgcttccggcggccccttgcacgaacagaagattgcttgaaacatcacggataatccggttctgctctttctgaatcgtcgccacaatatttttcatatgggtgtttgcgtttgccccaagcatttcctgcagcatttcatcgccgatcgagatcccggtatcaaacatcgcttcaatatggccgcgccggattaaaaactgccgtttcaaatccatgatgccttcgcgcctgccgtccggcgcctggtacgaaaccgggccgggcaccccgtcatagtaaatactggaaatcggcgcacgccaatcgtacacgagatactcatcctcatcccggtaggaagcaataccgatgtagatgggctcggaaggttccccttcttcatgaaaatcgacgcgggcaaaatacggcgaataaatgaggcggtccagttttttcacgtctttttccatatgcccgtagctccgttcgcgttcagcaagcagttctgcctgctggcggacgctcgccgatgtttccacgacatcatccggctcatcgaggttcaccgttacgtcttcccagaacgtattgcggatttcctgtgcctcgccgcggacagcccttactttggaaagcagtgtttctttttcctgcttcattttttcaattgtataatcaacgcgtttttgttcctttaaccattcttcatcatgtggcataaaaccggccccttcctgacaagtaagagtatagaaaaactttcttcaaatgcattggcataaagcagcacattccaaccagccgggaaaaacgcggccccttaagccaataaatttgacaatcgtcattggaagatgctataattaaggtggtaaaatgtatattgcaccatccattgcactccgcattttagtataccacgtttctgcctgtttttccaatgtctggtctgttctcatgttttttcttagaagaccgcatgatctatcatcttgccattctttttctccatttccctttttcaagcataaagtgattcacgctggcaaaacctatccgtaatactgtttgttggaggttgctaacgtggaaaatccagtactgaccattgtcgttccctgttacaacgaagaggctgttttatacgaaacggaacgccagctgacggaaatggtgtattccttgatgaacgaaggcctgatcagcccgaaaagcaacattttgtttgtggatgacggcagccgtgaccaaacatggccgatgattgaagaaatcacaaggaaaaaccggcttgtcaaaggattgaagctttcgcgcaatttcgggcaccaaaaagcgctgcttgccgggcttgaaaaagcaaaagaagcggccgactgcgtcatttccatcgatgccgatttgcaggatgacatctcggttatgcgcgaatttctattaaagttccacgacggctgtgacattgtatacggcgtgcgaaaaaagcgcgagaaagataccttttttaaaagagcgactgcccaggggtattaccgggcaatgaaaaaactcggcgtcgatctcgtatacaatcatgcagattaccggctgatgagcaagcgtgcgctggaggagctttcccgctttcccgagcaaaatttatttttgcgcggcgtaatgccgttaatcggcttgcaaacggctgaagtgctttatgaccggaaagaacgggcagccggcgagagcaagtatccgctcaaaaaaatgctggcgtttgcctttgacggccttacttctttcagtgtggtgccgattcactttattacccttgtcggtttgtttacttttttatcaagcaccatcgccggcttgtatgcactttttgtaaaaatttccggccatgcggatgacggctgggcttcgattatcatctccatttggtttttaggcggctttatgttgatgagtatggggttaatcggcgagtatattggtaaaatttaccaggaaacaaaaaggcgtccgcgctacacgattgcgcaggatgcacagcaggagacaatcagccagcaattgttgcggacacagcaggattcggcaaaaaggattaattgacaagcctgttgtcgctttttacgtcgtatcagaagcggtggttggcttgttccaccccgccgcttccttctatctcgcttttttgggaagccgtgttttcgtatgcggcaaagcacctcggtgaacgcgtaaacacgggcttcttttctttcagatcattttacgaaaagcagccgtaaaaatcgcagtttttcaatccatgatcttaccagcctgtaagaaccggaaccaaacgcaggcgttacctcaagtgcaaaaaagcgaaaggcacacatcatcctttcgcttttcctgcttaaaatggaatcaccccaatcgccaatgccacaatgatcataacgagggccgatgcgcacgcccattttaagaaagcacgctgcaaatcgccaaactcggcgccgaccatgccgaccagcaaataggtggacgggacgagcgggcttagcaaatggaccggaagcccgagcagcgatgccctgccaattgcctccgggctaatgccgtacgctgcagccgctttcgcaacgagcgggagaaccccgtaataaaacgcatcattggacatgaaaaaggtaaacggtgcactgatgactgctgtgatgacggcaaaatgcgggccccatgcagccggaacgtgcgtgatcaatgtatttgccattgcgtcaatcatttttgtcccggacaaaacgcctgtaaaaatcccggctgcaaaaatcatccccacaaccgacatcgcatttccggcgtaggcggccaccctttctttctggacatccatattcggatagttcaccatcgctgcaatggcaaaaccgagcataaacaaaaccgctgccggcagcacttccataatgagcccaacaagcagtgcaatcgtcaaaaggccgttgaaccaaatcagtttcgggcgctttaattcattcccctcaccgactgcaacggctgcagcctgttccaaaaatgcctcattttctgtacggatgattcccagccgttttctttctttccgcccgaggtaaaaagcaaggaaaaagacaaatagcaaaccgccgatcatagacggaatcaccggcgtgaacagatctgacgtcccgaggccgagcgcgctcattgccctggctgtcgggccgccccatggcagcaggttcatcacgcctgatccggaaacggcaatgcccgcaagcacgagcggtttcatgccgatccgctggtaaagcggcagcatcgcggaaatggtaatcatataggtggttgtgccgtccccgtctagcgataccaaaacggctaagaccgctgtcccgattgcaattttgagcgggtccccttttacgagttttaatatttgcgagatcaccgggtcaaataaccccgcatcgatcatgagcccgaaatagagaatcgcaaataaaatcataatgccggtcggcgcgacgcttgtaaccccgtcgatcgccatcttcccgattcccttccaaaacccgccgattactgcaaaaatgaccggaaccaccattaacgcaatcatggcggaaagccgcttggtcatgatcaaaaacatgaaaacaataatcatcaaaaatcccatgaatgccaacacaacagccaccccttcgttcgtttctttcagtttacccaacaaagcaaatattgtaagcgatttcaaaattaatgatataaaatctattttgatgattttgttcattttgttcacgaaaaaaaggggggcatggccggcgcttacctatcaaacggatgaaacaaggtaatatttccgctccggcctgccgacgatgccgtattcgacttctgccctgcacgtccggatggaaaccaggtattccaaatagcggcgggcggttgtccgggaggcgccgattttttcggcgacctgttcagcggactgcccctggtccggaaccagcaccgcttttactttgctcagcgtaatcgcatcaatccctttcggcagctccgtttcctgcgtccccgcttcccggcgcggcgccccgaacagcgaatcgacccaggcctggtccaccgtacccgctgtttccaggaggcgctttttatccagatacttttcgaccgcctccttaaactgcttgagtgaaaccggcttgatcaaataatgttccaccccataatgaagcgccttttcgataaaatccttttccgcagcggctgtaatcatcataatgtcaagatgcggcgccaatgcccgcaggccgggaagcaggtcaacgccgagccggtcaggaaaatacacatcaagaagcaaaaaatccggggatttctcctccacaagcgccagcgtttcttttgcattcagggctttgccaaccacttcgaaacaagggaactctgccagaaatttttcatggacaagcgccacccggaaatcatcctcggcgatcaccgcttttattgttttcaactgtcgacaccctttcttttcggcacataaactgtaaaaaccgttccttccccggggtggctgtggacttcaatgaaacccccgagttctgacacagcatgggcggcattggataagccaaaccctctgttcgcttcttttgtttttgtcgtaaaacccctttcaaagatatgcctgaggaccgcttcttccatcccgggcccgttatcgctgatttcaaatacaatgtcatcccccatatccgttgcaaaaaacaagacggccggaggatctgttttccctgctgcttcaaaagcattgtcgagcagattgccgagaatgacaatcagccgcatcacatcgatttgctttggcaacctttctaaagaactgttcggatcaatatcaaaacgaatctttttttcggatgctttgccgagtttgccgagcaaaaccgcctggactttcatatcttttatcttttcaaaaacacgggcgtgctggtttttcaaggatgccgtctcttcccggataaattcatttgcgtcttcatatgccccaagctgcagcagccccgaaagaacatgcagcttatttgcgtattcatgggactgggcccgcaaatcttccgagtatttgcggacttcgctcaatgtattggccattcgttcaatttcagaacggtcgcggaaagaagcgaccgctccttgcacttgtccccgttcatcgtgaatcggagtgctgttcacgatgagcgtctggtctttccataccatttcccggtccatttgcggcttgccggattttaacacggcgtaaaaaatggaagccggtatcagcctgtcaatctttgtacgcctgactgatccgccaatatgcagcatttttttcgccggctggttcatggtggtgacaaacccttcccggtccacagcaataatcccttctttgaccgcatgtaaaatggcccgcttttctttgtaaagcgaggcaatttcgaacggttcaagccccattgtgtctttgcggatatcccgggcaagcagcacgcttccgatgatggcctcgaaaaaagcgagcagtgcgactccggcaactttcatcatgtggatgttggtctgccggttcacatcgctcagcataaatccgaccgatacgatgccaataatgtttccgctccggtcgcgtaccggtgttttccctcttaatgacgggccaagcgatccttttgcgcttgaaatataggattcccctttcaaaatggcccgttcattatcaccgccaaccatctttttgccaatccggcccgggagcggatgggagtagcggatcccttccctgttgccgacaacgataaactcggcgccggtttctttgcagattttttccgcaagcggctggatcgtgtcggacggatccttgctttggaaagcgtccacgacatccggcattgccgccaccgttttggcaatatttaacgccaggcgcccttcctgttgttcgatttggcgctgctccagcatcataaaataaccggaaagcgcgccgatgatcaaaaaagacaggagcagcacaagcccaagtatttttgtctgcaatgaaactttccttttgcgcatccccatcccccgccaaacaggatttatctccattttacatgatttttggaaatgttgcggcaaaaaaggaatgatgcactgaaacgggtgccctgcccaagcaaattaaaagccgccgggaatgtcccggcagctggaaaaaagcggatatgcccgccctctattattttgctgcagcctgttcgtaaaccccctcttcgtacggctgtccataagcatgttcgccgtgcaacgtgatatcaaggcctcttttttccgattcttcatcaacgcggatcggcataaacaattggatcgctttgatgataataaaggaggcaatgccgacgaaaatataggtggacacaatggcgacgagctgcttccagacgagcgacggatcgccgtagaacaagccgtttgcgccggcggagttgaccgctttggaggcgaacagtccggttgcaatgccgccccatgtgccgccgataccgtgaatgccgaatgcatccagcgtatcatcatagccgagtttcgatttcaaatacgtgacgccccagaagcagacgatgccgccaaccaggccgatcaaaatcgatgccattggtgttacaaacccggctgccggtgtgatcgctacgagccctgcaatgccgcccgagatcgcacctgacaatgtcggctttttattgacaatccattccaccgcggcccagccgattaacccgcaagccgccgctgtattggtattgatgaaagcatacatggcaacttcgtttaacgataaggcacttccgacgttaaatccgaaccacccgagccaaaggaggctgccgccgatcaggacaagcattaagttatgccgcccggtttcggattctttccgtttgccgagtacaagcgcgaggatgagggccgccacgccggaagaaatatgaaccacattgccccctgcaaaatcgagtgcgccaaggttgcggatccatccgccgacgccccatacccagtgggcaacaggcgcatatacgagcacgcaccataaggaaatgaaaatcaagtatgccgaaaaccgcatccgcccgacaaaaccgcctgaaatgatggcaatggttaaaaccgcaaacgtcatttggaacatcatgaataagttatgcggaatcgtcgcgctgtaatctgcattcggtttaaaggtgacatcgtgcagccccgcccagcttaaatcgccgagaatcgcgttgccgccggttgaaaatgccagcgagtaaccaacaagaatccataataccgatacaatgccaagcgaaccgaagctgtacatcgcggtgcttagaacgtttttgcttttcaccatccccccgtaaaacagcgcaatcgcaggtgtcataacccaaacaagcgccgtcgatacaaacataaagaccgaatctgcaggaaccatttgcctcttcctttcttatgttaaattttataacgtatctttgttatataaattatcatatgtgatgtcagctattttttcaatactttttcgttaatttttttaaaatttttatatttcttgtcaggttttcttacaaacctgtcagaatgcgctttcagtgcacaaatcattacagatgggggctgttttcctcctgcaagcttttaaaatgattggtacatcctaaaatgtggtacaatctgtctgtaaaactccaaagaaagaagggaattgaatgaacccgtttacgttttataacccgactgaactgattttcggaaaagggcagctcgaaaagctcaatgaaaaaattgaccagcttggcaaacggattttgcttgtatatggcggcggcagcatcaaacgttccggcttgtacgataaattgcaggcgatttttgagaaaaaagcctgccatgtgcgcgaacttgcgggtgttgaaccgaatccgcgcctgtccactgttaaaaaaggcatctccctgatccgcgaaaatgaactcgactggattcttgctgtcggcggcggcagcgtcatcgactgctcgaaagcaatcgcaggcggcgccctgtatgacggcgatgtatgggatttttacgaaagaaaggcaaaagtggaaaaagcgcttccgcttggcactgtgctgacgctggctgcgacgggttcagagatgaacagaggctccgttattacgaactgggaaacacagcaaaaacacggagcgagcatgactttcccggcgttctcgattttagacccagaaaatacgtttaccgtgccgcgcaaccagactgtttacggcatttcagatacgctctcgcacgtatttgagcaatatttttcgcatacaacagaaattccgttgcaaaccggctttgcggaaacgattatgaaaaccgtgatcgaaaatgcgcgcaaagtgctgcaaaaccttgaggactatgatgcacgcgcaaacttaatgctgagttccacttttgctcttaacggcctgcttgcggccggcgtggaaaccgactgggcaacgcactcgattgaacatgccgtcagcgctgtttacgatatcccgcacggcggcgggcttgcgatcatcttcccgaactggatgaagtatgtatataaagaaaatatcccacgtttcaaacggtttgccgttgaagtatggggtgtggatcctgaaggcaaaacggacgaagaaacggctctcgccggcattgatgcagtccgtgctttctttaacgaaatcggcgcgccaagccggcttgcagattacaatatcggcgatgacaagctcggcgtcttggcggaaaaagctctgccattcggcccaatcggcaactttcgaaaactgggcaaagaagatgtgcgggagattttgagaatgagcttgtaataagaaaaggatgtcctatataggacatccttttcttattgacggggcctgcgaaatgaggggttatcatctttaaaatactcgcaccccacttccgaatcagcagaaattctggacaaagcggcggcccgttagaaaccgaccaagcaaaggagcccagtcaggaagcagccttcccaacgggttgcagttactccagcacttctttatatactttattttcccgcatcaaaaccgggtacaaaaccaggccgataacaaacagcccgatgccgaggaagaatgtttttaaatcggcagtgccggtgatgatgacccatatcgaataaaccagcgcaatgccggtaatgatgccgtccgttgtgcgcgcgccaagagacgtataagtttccccagctgccaccagcttcaactggtaaataaccgatacaagatacgggatcaaatacgccagtgttgccacaacaatggcaaaatcatatgcttccgaaatggtgtccgatacagtggaaaataaaaagatttgcgtcatcatattcgttaccaataacgaacgggacggcgatccttttctgttcgttttcccgaaaaatgccggaaaaagtccggactttgccgcctggtacggcacttcggagctgacaataatccagcctaccgtggaaccgaacaaggaaatgagcgccagtgcggctaaaatatactggccgtttgcaccgagcacctggccgagcgcatcgacaagcggcttatgcgagacgcgcagttcagcctgggacaaagcgcccattgtcagcagggtaatgccgacataaatcaagatcgagatcaaaaggcccagaagtgttgcctttttcacatctttttgtgatttggcgcggtttgacagcatcaccgccgattctatcccgataaacgcccacaatgtggagatggcgccgccgttaatttgcccgaagagagaaacggcgtggccgtccgcatcggtaaaagctttcgcattgccgaagttcgcggcatcgaatgcaaaaacggtaatgacgataaacatcataaagccgagcacttttgtgaccgtcgccacaagattcatttttccgccgctgttaaagctatgcgacaggatccattgaatcccccatagcatcactgtacacacggcaaatgtcaaaaatttcccgtcctccatttggaaagatccgagcgaaaacaagattttcgtgctttgcataatcgggaaaaatgtcgttaaataacccgcaaacgaaataatgacggaagccgttgccgcccagttggctgcccagtagccccatgccatactgtagccggcgacccggccggcctgcttcgatttaaaaagcgactgtgcgtagctttgcggccctgctttcagttccggtttccggatggccaggtttccgaacacgagcgcaatcatcaaaacgccaaagccggtcagaacccatgcaagtgttgaaccgagcgccccggccttatttgcgagattggccggcagcatgaagaccccgccgcctaccatattgccaacaacgaacgtggttaaagtccaaagtccccattttttattcatgtatattcaccctctgtgttggtttggtttcgctccatttcatgtcattattttaacgtatttctttagtttgataaagtgataaattactaatgtggtaaaattatagtctggtaagaaaaggaattcgacaggaagcctggaagcgcacaaaccaaaactggcaagatgccaggccaagatcaattggcaatgctgcgggatgaagagaaaaggaaacgcaaaccgatcccggaaaaaacctgatgcccaagcttgcggccgggccaaaaaaaagcggcaaatcaggtgatttatttgtatttttccattaaaatgaatatatagaatggacttaacttttcaattccgaaacgggaatcaatcaggcttgccgttttatacggcaaaagttttaaatcctatatttctttcattgccaagttttcactataaggagtataataacagtaatccggtcatctgatgattggcctaatactttaagaaggtgaatattgtgagagtgagtttgttcatcacttgccttgtcgatatgttcaaagcggacgtcgggaaagcaatggtggaagtgctggagcggcagggctgtgaagttgatcttccaaaaggccagatctgctgcgggcagccgtcctataacagcggttatctggaagatacaaagcctgcgatgaaacaaatgatgaaagcgtttgaaaacgcagattacgtcgtatccccttccggctcatgcgcatacatgtttaaagaatacccggaaatttttgcgggcgacccggtgtgggaaccaaaagcaaaagcgctcgctgcaaaaacatacgaatttacacaatttctcgtggatgtattaaaagtggaagatgtcggggcaagcctgcacgcaaaggccacctaccatccatcatgccatatgacgcgcctgctcaaggtaaaagacgcgcctatgaaactgttaaaacatgtggacggccttgaatttgtgccgcttcctaatgcattgtcatgctgcggattcggcggcacattttccgtgaaaatgagcgaaatctccgagcaaatggtggacgaaaaagtggagcacgtcgaagaaaccggcgccgacgttttaatcggcggcgactgcggctgtttaatgaatattggcggccggatgacgcgtaaaggaaaaccgataaaaattatgcatattgctgaagttttgaacagcagggattaaaaaacggcaaaggggtgaaaaaaatgggtttatcgattagtgatgaaaaatttaaaggcagggtcgaagaaggcatcaacgatgattttatgcgcggtgccgtccgaagtgcccaggaacggctgcaaaccaaccggctggcagcggccaatgaactcggaaactgggaagaatggcgttcgctcggcgaagaaatccgccagcatgttttaaacaatctggactattatctatatcaattaagcgaaaatgtatcgaaacgcggcggccatgtcttctttgcccagaccgctgaagaagcgagccggtatattaaagaagtcgtgcagaaaaaaaacgcgaaaaaagtgattaaatcgaaatcgatggtgacggaagaaatcggcatgaacgaagccctgatggaagcgggcagcactgttgtcgaatccgacctcggcgagtacattttacaggtggccggcgaccatccttcccatatcgtcgcgccggctttgcacaaaaacaaagatcaaatccgcgacgtgttccgcgaccgcctcggctataccggcacagaaaaaccggaggagctggccgcgtttgtacgtaaagttttgcgcgaagaatttttatcggcggaaattgggattaccggctgtaactttgccattgccgaaagcggatcggtcggccttgtcacaaatgaagggaatgccgacatggtcacaacccttccgaaaacacagatcgctgtgatggggatggaacggcttgtcccgacttacgaagagtttgaagttttggtgagcctattaacgaggagcgcggtcggtcagcggctgacgagttatattacaaccgtgaccggcccgaaagaagcaggagaagtcgacgggccggaagaattccacctcgtgatcgtcgacaacgggcgttccgatattctcgggacggaattccaacaggtgctgcagtgcatccgctgtgcagcctgcatcaatgtttgcccggtttaccggaatatcggcggccattcgtacggctccatttacccgggaccgatcggtgcggtattaagcccgcttttaggcggatacgacaaatacaaagaactcccgtacgcctcttcgctttgcggcgcctgcacggaagcctgcccggtgaaaattccgctgcatgagcttttgatcaagcaccgccaagtgatcgcggaaaaagaaaaacgctcgccggtagcggaacggctgctgatgaaagcattcggtgtcggcgcttcaaaacccgggctttacggggcaggcgcaaaaatggcttccaaagtcgtacgcccgtttttaaaagacgatttgatccacaaagggcctggcccgatgaaaccgtggacggatgtgcgcgatttccctgcgccgaacaaagaacctttccgcgactggtttgaaaagcgggaaaaagacagggggcagaaaaaatgaacggagccatccaaaaccgggatgcatttttaaaaaatattgccggcaggctcggccgcaagccggttgtatccggtgttgcccgcccggattacaagcacaagccgcaatatgatgtactgccaaatgcaaaccaggaggaactgctggaagtattgcgccagcagtcgctcagtgtccatgttgatttttttgaaacggatgcaaaaactttgcccggaaaattaaacgaagtcgtggaactgtacggcggcgggcctgtctcgctttggaatgacaggcggtttggggaattcggtttaaccccgctgattgaggaaggctggccgaaattgggaattgaaacccatgtctgggatcccgaaatcggcgaaaaaaatatcgcgctgtgcgagaaagcgaatgtcgggattacgttcagtgatatcacactggcggaatccggcacggtggttttattcagcagcaaagaacgcggccggtcggtcagcctgctgccgaaaacctatatcgcgattgtgccgaaaagcacgattgtcccgcgtatgacgcaggccgccttaaagatccgcgaaaaaatcaaaaacggggaaaccgtcccgtcgtgcatcaattttattacaggcccaagcaactccgctgacattgaaatgaacttgatcgtcggcgtccatgggccagttaaagcagcttatattgtcgtaaacgatcaataacaaaacgtaaaaaaatagatggcctgctgaaacaggccatctatttttttggattttatgctgtttttttcgctccctgctgcagctcactgtggcggatactgtatccgaagtaaatgaccatgccgattgcgaaccagacagcgaaacggatcaaagttgccggctgcaggcttgcgatcaggatggtgcaacaaatcgcgccaagggctggcaggactggcacaagtggcgctttaaacgggcgttccagatccgggcgtttatatcggagcacgatgactgccacgcatacaatcacaaatgcagcaagcgtcccaatattggtcatctcagccacgatattgatcggcaggaacccggctgtgaccgcggttacgatcgcgaccagaacggttgaagtcgccggggtttttctcctttcactgacttttgaaaaaattttaggcaaaagtccatcacgcgacatggcaaacaatacacgcgtctgcccgtatgccatgacaaccaatacggaagtaatcccgcaaatggccccgacggaaaccagtgccgcaccccagtgaatgccgatttgctgcaatgcataagcaactggagcagaagcagcttccggcctgccgaaaatgctgaatttgacaacgcctgtcaaaatggcggaaacgatgatatacaacacggtacaaattaacaaggagaacaaaattccacgtggcacgtctttttgcgggcggcgcgtttcttccgcagctgtcgacacagcatcaaaaccgatgtaagcaaagaaaataaccgctgcgcccgaaagcacgcctttaaacccgaacggcatgaacggatgccagttgaccggttttacatgcccgacagcaagcacgataaacaacaggacaacggccactttaatggctacgatgatgccgttcaggcgggatgtctgctggacccctgaatacaacagccaggcaaccaaagcgatgatgagaatggccggcaggttgacaatgccgccgtccatcggtgcaagcgtcagcgcttttggcagatggaccccgagatttccgagcaggttcacggcgtatccggaccagccgatcgcaacggtcgcaaccgccaggccgtattccaaaattaaatcccaaccgataatccatgcccaaaattcacccagcgccgcatacccgtaagtataagcacttccggcaaccggcaccattgatgcaaattctgcataacacaaggcagcaaatccgcatgcgaggcccgacaggataaaggaaatgacgagtgcagggccggaatagtttgctgctgccacacctgtcagcacgaaaatgcctgtgccgataatggcgccgatcccaagcaaagtgagatcgagtgcaccaagcgcttttttcagcccttgcttgccctgggtctcttctacaaggtttgcgattgcttttgtctgaaagatgctcatctctcatcctccccaaaatttttgtataattgcatatctctattatacttttcattgaaaatttatcaatatagaaatataacaaattaataaaaaattttgattgtaagaaattgtaacccttatcacgctttttcagcctgcccggatatatccgtattggtttgccggcagcaaaaactgttgtatttgcatcgtaatagaacatggcagcgtaaaaactttgcatatgaaataaaagaacgtccgcgaagctttttcgtgaaggcccctgatacgtttacccggggccgggtaagcatatcaattcgcaatttaaccctgcggcgggcttttgccacggatcttttgcctgccaacggtggttcagcgccaaaaacgggcctaaaatctttcttggaacaacccgcaatccttcaaaatcgtgagcctgctacggaatagtatgtgtaaaattttannnnnnnnnnnnnnnnnnnnnnnnnnnnnnnnnnnnnnnnnnnnnnnnnnnnnnnnnnnnnnnnnnnnnnnnnnnnnnnnnnnnnnnnnnnnnnnnnnnnattacatcttttccgaaaattacaccgagcaagtaaagcacggtagccgaaagtgtacaaaaagagtgtcttggaatacccgatatttaaaccttgtcgagaaaaacttgacacatacacggaatatccgatggtcgcaatcccgctctcgtatggtataatcaaactatcaaggaggggattttatggcagcccaattgaccattacagaccgcaaacacgtgattcacgcggatatagaaaggatggccgtttttttgcagggcaaatttgtcgaggcaaccggtgatgatggccgcctgtggtatgtgattttttacaaggaccattatttgaacgcggtacccgccgccaaaatgaaacggcagtccgcagtggcgcaggctttccgtgactgcattgtgctggagcctccccatccgctgattgatttgcttttccagccgggttgctcttttaaaaccgttcattttgcccagcttaccggcaaaatggagaaactgttcccgccacttgaagccgcctggattgccacgtttttcgaatcgtttgtcccgaaacggaagctctttgaatatatccagtccatcttttacgaataccgccgcaacggccagctattgcagtgcgcgcgcatcctccgcatcttaaaagattttgcgccgaagcaaagctgggtcaagcaaatgtcccgcgatttaaatctgattaagtacgacaaactctttcaatcctattcacccgaactgatccggaaagaccccctttatgccgaaaaacttttatatgagaaaatgccggataccgatgcttttgcaaaactttgcagcctgctgcgggcgcaaaaccggtgggcggacgaaatcgcgttaagccttgaacagatggaggcggcgccatccgatgccggttacaaagcccttcttgagcggctggaggcgctttttgaacaggcggaaaaaatggccattttggaaaatctttatgcccgcatccggcagtttgaaccgctgcagcaggatttactgaagttttatattgagacaaaacaactggaaaaaatgatcccgatgatgcttgaggaacagattcagcttagtgcgaaacaggcggaaaaagtggaaaatatgcttgaatcatggagcccggatggccatacagatgtggaaacgctgaaccggcttgccccacttttttccgggcacccggcacaggcagagaaatttgcggcaaagtgcatttcatatttgttacagcaccgggacacttcctatataatggaatggctgcttccgttcaagaaagcagcggggcatttgccggccatccgcaaagtggagcaaatgcaccaaatggcggacgatcccgacaagcaatcgctgctcggagaattgtattttgaatttgggcaatacgacaaggcgcttgactgtttcagctgggaaatggagttgcgggaaaacgacccaaccccggtcaaatggttgtcaaaaatttatcacgaactcggcatgcaggcggaatcgaatgcataccggaatttgtatattgatatggaaaagcgaagagcgtaaggcgaaagtggggccagaccctgctttttttatggccaagaacgcgggtcgcccaaatggctgcgatgaaggatatttccgggggtgagcggggtcccttttgtctttcataaccacgatgaaggacatttctattggcgggcgggtcccttttgtccttcatgcccgctatgaaggacatttccgcgggctaccgtctcttttttgtctttcattcaattgatgaaagacatttggacactcgaacgatccccttttgtctttcataactttgatgaaggacatttctgccgtcgggcggggcccttttgtccttcatgcccgcgatgaaggacatttccgagggctgacgtctctcttttgtctttcattcaattgatgaaagacatttggaccctcgatcgcttctcttttgtctttcataatctcgatgaaggacatttctattggcgggcgggtcccttttgtctttcatgcccactttgaaagacatttctgggggcgggcagggaacacttttgtcttcatacctgtgatgatcatgttcgggatgctccttttggttttttggagagctccaaaaggacattttgggggctaaccgggttccttttgtccttttgaactctccaaaaagacatttcgaacactacccaagccacttttgtccttttgaaccctccaaaaagacattttgaacaccaaccaggccacttttgtctttttgaaacctccaaaaggacatttcaatcgctgcccggattccttttgtccttttgaactctcaaaaaagacatttcgaacactacccaagccgcttttggccttttgaagcaccaaaaggacattttgaacaccaaccaggccgcttttgtccttttgaagccttcaaaaggacatttcgatcgctgcccggggtccttttgtctttttgaagcctccaaaaggacatttcgatcactgaccaagctgcttttgtccctttgagccctccaaaaggacatttcgatcactgaccggggtccttttgtctttttgaagccttcaaaaggacatttcgatcaccaaccaggccacttttgtctttttgaagcctccaaaaggacatttcgatcgctgcccgggccgttattgtctttttgaaacctccaaaaggacattttgaccactacccgggttccttttgtctttttgaggccttcaaaaggacatttcgaacactacccaagccgcttttggccttttgaaacctccaaaaaatatctcaatcaccacccgagtgatgtccgtgcccgctggaaaagacattcagccggttattttcgcccgtgatcaacttgaaagccgccccgcggattcgggacggctttcgttatttggtatgcattttaaattccaaaaacagctcattatagcgggcgagttttttcttgccaagatttttatatacttcgagtttctttgtaagtgcagcgtccggataaaaacggcggtcgccggaaatcgattttggcaaaagctgcaaagccgcttggttcggcgttgaataaccgacgtactcggcgttttgcgcggcatttttcggatcgagcataaaattgataaacttcagggcgccatctacgtttttcgctgttttcgggataaccatgttgtcgaaccagagattggagccttcgctcggcacaacatagttcagctttttattctccgacatgatttcagccgcatctcccgaccagacaaccccgagcgaagcttctccattggccagcagcatcttgatttcatcaccgacgatcgctttcacattcggcatcagccggtcaagttttgcttttgcctgctgcaaatgtttttcattcgtgtcattcaacgagtaatgcaggctgttgagccccatccccatcacctcgcgggcgccgtccacaagcagaatctgatttttcaaatcgggatcccacaggtcatcccagcttgtaatttttttgccgccgagcatgcttgaattgtatacaatcccgactgtcccccagaaataaggcaccgagtatttatttcccgggtcaaacggcaaatccataaagcgcgggtcgatatatttcaagttcggcaacttcgaatgatcaagcggaatcagcaagttctcctttttcatcttttcgatcatatattcggacggaaccgcaacatcaaacgttgtgccgccctgggagattttcgtcatcatggcttcgttcgaatcgaaagtctgataaatgactttgatgccggtctgcttttcaaatttcttaatcaaggcggggtcgatataatccccccagttgtaaatcgtaagcgtattgccgcctgcgtagccttccgtttggttcatgcgcccggcgagaaactgcagggcaagggcaaccacgagtatcgcaatgaaaacacgcaacaactgtttcatcttttaacccccattccgttcgtgcgggcctggcgctggttaataaggtagtacccgatcacaaggataatggagaagaaaaagagcagcgttgacagcgcgttaatcgtgagtgaaatcccctggcgcgcccgtgaataaatttcaacggaaagcgtggaatagccgttcccggtgacaaaaaaggtgacggcgaaatcatcgagcgaatacgtgagcgccatgaaaaaaccggcaaaaataccgggcgtaatatacgggagaatcacttttgacaacacatcccactggctcgccccgaggtcgcgcgccgcatccatcaaagtcgggctcatttcctgcagtttcggcagcaccatcaacacaacaatcggaatgcaaaaagcgatgtgcgaaacgagaacagacgtaaagccgagcttgattcctgcaatcgtaaataaaatcagaaacgaagcgccgataatgacgtccgggcttacgatcagcacattattgagcgaaagcagcgcatttttcgttcttcttcttttcacaaaccggatcgcgagcgcccccatcacaccgatcaccgttgaaatcgcggatgcgagaagcgcaatcacaagcgtgttgatgacaatgatcacaaggcgcgtgtcctggaacacttccttgtaccattcccatgtaaaaccggtaaattcatgcatgttccctgctttgttgaacgaataatacattaaataaaagatcggcgcgtaaaggacgataaatacaaatatcagatacaagtttgaccatttccatctttttctcaacttcatccctcacttccggttgccggtcacaatcataatgacgaccatggcaatgattaaaaagacggcgatcgtggaccccatcccccaatcctgtgtgacaaggaaatgctcttcaattgccgtaccgagcgtaatgacacggtttcccgcaatcaggcgcgtaatcataaagagtgacagagacggaataaagaccgcctggcaccccgattttacgccgtccatcgtgagcggaaacacaacgcggcggaacgtggtccatttcgaggcgccaagatcgcgtgccgcatccataaagaccgggttcagttcttcaagcgcgttataaatcggcaaaatcataaacgggataaaaatataagtggacacaaacaaaaagctgaagtctgtaaataaaatctgcttttgcccaatgccaatccattcaagaaacgagttggccgggccgaatgtgccgaaaatcccgagaaacgcatacgcttttaacaacaaattgatccatgtcggcaaaatgattaataagagccagagctgcttatgccgcgattttgtcaaaagataggcggtcggatacgaaattaaaagcgtaaacgccgtaatcaaaaatgcataccaaaaagagctcagcgccattttcaaataaacgggcgtaaaaaatttttcatagttgacaagcgacaaatgcccttcaatatcaaaaaaagaataatagagaatgagcaaaatcggtgcgactacaaaaagaaggatccacagcaaatacggaacgagataaaaagcgcgtgcattcactttcatggccggacctcatcgtacgcttccaagcgccggtcgaattcctcttccgtttcgccgaatctcatcacgtggatcgcttccggttcaaaataaaggccgatcgtatccccgacttttgctttttttgtcgagtggacaagccattcatttccctcttcatcgtagcagcaaatttcataatggacgccgcggaacagctgggtatccacccgcactttcaaatttcctttttccggcgtcgtgatctccaggtcttccgggcggatgacaatttcaaccggctcgttcgggttaaggccgcggtctacgcattcaaacgcacggccgttaaattccacaagataatcgcggatcattttccccggaaggatattggactcgccgataaagtccgccacaaagcggttgatcggttcatcataaatatcggtcggcgtcccgctctgctgaattttcccgttattgatgacaaaaatttcatcgctcatcgcaagtgcttcttcctggtcgtgcgtgacaaaaataaacgtaatgccaaggcggcgctgcagttcgcgcagttcatactgcatctctgtcctcagcttcaaatccaaagcggaaagcggttcgtccagcaaaatcacttccggttcattgacaatcgcgcgcgcaatcgcgacccgttgccgctgcccgcctgacatttcgctgatttcccggttttcatagccttccaggttcacaaacttcaaggcttcttttactttttggtcaatcacagccgccttcatttttttaatgcgcagcccgaacgcgacgttttcatacacatttaaatgcggaaacagcgcataatcctggaaaacggtattgacctggcgccggttggccggaacgtcattcacgatttttccgttgatgtaaatatttccttttgtcggcgcaataaatcctgcaatcaggcgcaaaatggttgttttcccgcaacccgacggcccgagcagggtgtagaattttccgcgttcaatttcaaaactgacgtcatccaaaatagcaggatcatcgtcgtattgtttcgtgacatggtcaaaacgaatgatgatatcgctgttcattgctgtcctcctcttctttccgcatgcagcctacagatacgattccgtggcaacgagcacaagcctggaccggccttccgcgtcattcagtatctgatgctcatcggatgcatgataataaatggcttctccggctttcgcacggtacaggcgtttgccaagccgcaccgcaatccggccttctaatacataggcaaaggtttccgataaagaaggttcaaaggttttaaactcccctttttcctcaagcgtgagcaggatcggttccatttccttttcattcgactccgggacgagccactggattttatacccgcgctcttcatcgagataatcggtctggtcttcttccccgtataccactttttgttcacgctcttcttcatcaaaaaattcttttggcgtgcagccgagcacttccaatatattaaaaaacgtgtcaatcgagggggagcttaaatcccgctcaagctgggaaatgtagcctttgcttaaatccgtgcgctctccaagttcctcctgggtgagtccttttttcaaccttaagtttttaatctttttcccaatttccatcataagcccttcccatttgtttagcatttgtaaactcaaaggcaaggaagttctgttttattaaactttaagtttactttcatttgtattatataaaaaagcaggcagatgtaaaggcctttttgaaaaaaaacacgaatcaggctgtcatcctgcctgtttgtacacgcggaaaagcggtagcccctccttttcagccaacgaaccattccaatcaggcgtttgcagttttcgcacggagaggcagatgtttgccaaaaagcctgtatataaaatggacaaaatattgccgcgctgttgcccgctgcaaaaagtcaatcatgcaaattagtgccgggcttgatgtaaaaacttaagcccattttatatcccatatatttttgccaccccgttctgcttccttttctattgattttccctaaaaaataactataataatatgtaaatcaaatggaataaaaaatcctcatcaaatccggtgaggtagaggtcgcagcttttatgagtaaatcggacgagacacgggtaaagtttaagactccggttgaaaggaaaagctgccgaaacgtggtgccggatcccgcggtgccatgttggggctgtttccgaacaggaacagaactgtcacatatgcgattcccccccgcatatgtgttgagctatcttcggaaggttgatggagggtatacgctttgatgccgcgtctccacgactgcggcatttttgtttattccctgctccttcctatataaaaaggagtgaatcaaggatggatgacttctatcatgggcaaagcactgcagccggagcggttcccgttgcaaaaaagggtgaattgacgaagctgaagcggaaattaaaatcccgccacctgaccatgatttccctcggtggatcaatcggaaccgggctttttctggcaagcggcggggcaatccacagcgcggggcctggcggtgcgcttctcgcttatgcattaatcggcgtcatggtgtactttttaatgacaagccttgcagaaatggccgcctacatgccggttgcaggcaccttcagcacgtacgcaacaaaatttgttgatccggcacttggatttgcgcttggctggaactattggtacaactgggcgatcacgatcgcagccgaattatcagcagcaaccattatcatgaaattctggttcccgcacatgccttcgatcgtgtggagtgcggcttgccttctcatcatgttcttattaaattatttatctgtaaaagggttcggggaagctgaatactggtttgcaatcattaaagtcgtaaccgtcattgcctttatcattgtcggcgcactgatgattttcgggattatgggcggaaaaacaatcggcttttctaactttacgattgcagacggcccagtccacggcggattcctggccgtgctcggggtttttatggcagccgggttttcattccagggaacagaactgctcggggttgcggccggtgaaagcgaagatccggaaaagaccattccgcgtgctgtgaaatctgtattttggagaatcttgcttttctatattctggcgatttttgtcatcggcctgttgattccgttcacggattcgagattaaccgccgatgacattacgatgagcccgttcacaattgtatttcagcgtgccggcattgcttttgcggcttctgtcatgaatgcgattattttaacggctgttctttctgccggcaactcgggcatgtacgcgtcaacgcggatgctctgggaacttgcgcgcgacggcaaagcgccgaaattcctcgggaaactggataaacgcggggtgccggtgaatgcactgattgtcactgcgcttgtcggaacggttgctttccttgcgtctttcttcggcgacggggcagtgtacaactggctcctgaacgcatccggcttatccggctttatcgcctggctcggcattgccatcagccattaccgattccgccgtgcatatgtagcacaaggcaaagctttgagcgacctgccttaccgttcaaaatggttcccattcggcccgctatttgcgtttgccgtttgtacggtcgtcattctcgggcaaaactaccaggcatttttgggagaccatattaagtggggaagcgtatttgtctcgtatatcggcctccccatctttattgccgtatggctcatttataaatgtgtgaaaaagacaaaagtcgtttctttacgggaatgcgattttaaccgggaaccataacggaaaaacctgcggtggatgccgcgggtttttacttttatcagaaacttacactttacataaattatatgaaatttacctttatttctatttatgaaaacgtttcccttacctagaaaaaaattctttttaaatattttcccagcacaaaatcctttatttcacgcgggtttcagggcttaaacaatagcgcacacaaatttgccaaaaaattaatctttatttttttctcattttacgttaatattttatctatcgcatttattccccgaaaaaaccagcacttatttttcagttaattttacaaattgtgccaatatgtgatgtttacaaggaggcaatggcatgtcaacaatcgacaagaaaaaagttctggaaactgttccacagaccggatttttcggtcatccaaaaggattgtcgactttatttttcttagagttttgggagagattctcctactatgggatgaaagggattctgatttactacatgtatgaccgcctgtcaaacggcgggttgggattggatccgacaacagccgcatcgattgcttcgatttacggcgcgcttgtttacatgtcggggattatcggcggctggattgcagaccgcctgcttggctccgccagaaccgttttttacggcggggtgctgattatgctcgggcatattgcgttgtcctttccgggagggttcccggcgctgatcgtttctatggtgctgattgtgcttgggacaggcttgttaaaaccaaatgccgcttcaaccgtcggggaattgtatgatgaaaaagacctgcgccgcgactccggtttcagcatttactacatggcggttaacctcggtgccttccttgcgccgatcattgtcgggactatcggccaggggtacaattaccatctcggcttcagcattgcagccatcggaatgtttttcggtttgatctcattcgtgatgtccagaaagaaaaatctcgggcttgccggctctgtcgtgcacaacccgctgacgccggaagaaagaagatcgacttttataaaaatcggcgcaggggctgtcattctgattattttgctggcgattaccattccggcacggattttaaatctgaacagctttattaccatcgtcagcattttaggatttttaattcctgcctggtacttcattatgatgtacttcagcaagaaaacatcgaaagacgaacgctcacgcattttggcttatattcctttatttattgcttctatcgtcttctgggcgattgaagaacaaggcgcgagcctgctcgctgtctatgcggacaagcggacacagctgaattttgccggcatccatattttgccgtcctggttccagacacttaacccgctgtttatcgtcgtctttgcgccggttctggcttcgctttgggtgaagctgggagacaggcagccgtccacaccggttaaattttctttcgggctcatccttgccggtttttcctatattgtcatgatggtgccggcttaccttaacggctcttcgtcgcttgtgagcccgctctggcttgtattgagctacttccttgtcgtgatcggggaactttgcttgtcaccggttggtttgagcgtatcgacgaagctggcgccagctgcattttcggcgcaaatgctcagtctctggaacttgtctgatgctgcggcccaaacgttgaatgcccagcttgtcaaactgtacagcgccgaccatgaagtgatctacttcggcggcgtcggccttgtttcggtcattttgggcatattcctgcttctctatgcaccggtcatcaaacggctgatgagagggataaaataatagatgaagtgatgaaaaacaccagaaaaacccgcttggaaatccctttccaaacgggtttttctggttaaatgcttttcttctttcgtgtcaggccgtaagcgatgacaagcaggatgaaccataccggtgtcacaaataaggcaacacgcgtatcttttgcaatcccgagaacaacgaggacaaagacaaagaacaagagtacaatccagttgatgaccggggcaaacggcaatttaaaagagattttggccgcttcttccggcatatttttccggaaacgcaagtgggcaaccataatgacgccccatacccaaacaaaacagatggacgaaatgcttgtgacaagcgtaaagacttgtgtgctcttcataaaataattcagcacgacgccgattaacagcatgatcgttgaaccaagcagagcaggtgccgggacattccgcttgtttaactttttaaacattttcggcgcttttccgtcttccgcaagagaatacagcatacggcttgtactgaaaatgccgctgttgcacgaggaagccgccgaagtgagcaccacaaaattgatgatgcctgccgcagccggaagaccgatatcggcaaatacccggacaaacgggctcgcgtccggattcagccggttccaaggataaatcgacatgatgacaaacaaagcgccgacataaaacagtaaaatccgcagcggaatctggttgatcgcttttggcagcgtctttgatggatcctctgcttccccggctgttacgccgaccagttcaatcccgacaaatgaaaagacggccatttcaaacgccagcagaaaccctttagaaccattcgggaaaaagccgccgtgctgccacaggttcgtaaaagaggcatgtgccccatggctttgaaaaccggcgaacacgaggagaatgccgataataatgagcgcaataatggtcacaactttaatgatagcgaaccaaaattccatttccccgaatgctttgactgtcgcaatattgatgagaaacagaacagcgacgcaaatcaaagcgggaatccactgcggcaattcgggtacccaaaattgaacatacatgccgactgcggtaatttcggcaatgccggttacaatccagcaaaaccaataggtccagccggtaataaagcctgcccacggtccgataaatgtttcggcaaaatgggtaaacgatccggtaatcggcttgtacatcagcagttcaccgagtgcccgcatcataaagaaaagagctaagccgattacgaagtatacgagcataatagacgggccggcaaagtgaatcgatttgccggaaccgaggaaaagccccgtcccgattgcgcccccgatcgcaatcaattgaatatggcggtttttcagcccgcgactcagttcttgtccattcgggctttgatccataccgatcaactccttatctatgtataaatttgattatatcacaatcttcttatttgctgccggcaaaaaaacaaaccgtatgtgtcaagtttttctcgacaaggtttaaatatcgggtattccaagacactctttttgtacactttcggctaccgtgctttacttgctcggtgtaattttcggaaaagatgtaatattaaaattttacacatacaaacaaaccgtatgtgcaaacgcctctgcggtcgtgtcagggttttgcaaggcagcctttattgtgcgctttcaaaaacgtcgggctgaaacttcccatttttgagaaaatttaacatgcagaagcagaccggcccatgataagagccggtaagcttgggtttaagcaaaccattgcgttttttcttctgctggggttcgttgcgctttgatgtccaattcctttttcggatagccaacatagatgagcccagcaattttatctttcggttcgaggttcaggtagtttttcaattcgggttcatgcgcgatgtcaccggtcctcacgattgtagccaaaccgagctcggttgccgtaagcagcaaattttggatcgcacaaccagtcgcaacgatttcctcaatttccggaacaatgccggaggggctgacagcaaccgcgatcaccaccggcgcccgtagcggccctttgcgcgctttttcaatctttttcgccgcttcttcttcactcaggccttccgctttcccggctgcaatcctggccatttcctctccgagtttggcgcgcccttcccctttaaacacgcggaatttccacggttctgttttcttatggtttggcgcccatgtggcagcttcgagcaacgttctaatgacatcatcgggcacctctttattgtctgtcacaccgatggaacggcgcgatttgatcagatccatcacacccattttcccaactcctttagccatactagtttaagtataagacaggaaaatacgtcaatcaacaaaaaacatttttccaccgtggaaatacattattgaaagatggcgctgatcttttgcacgtctgcttccgtcaggctgacttccaatgttttcagattgtcaatcacctgttccggccgtttggcacccggaatgacagcatcaatggaaggctgggcgagataccaggcgagcacaacatgcgcgacatccacgcctttttctttcgcaatcgggcggagcttgtcaaccttttccaaattgcggagataggtttcgccctggtagagcggatttttcgcacgcccgccttcaaatttggtatcttttgtatatttgccggcgagaagcccggatgcaagcggaaagtacggaataaacgaaatgctgttttccgctgtgtacggaagcaaatctttttcagccccgcgcttgaataaattgtactccgactgcagcacatcgacatacccgtcttcgtttgcctctttcagttgttcaatggaaaaattagaaacgccgattgcacggatttttccttcatctttcagttctttcaaggcgccgaccgcttcgtctttcggggtgcggtcatccggaaaatggatataaaacaaatcaatataatcggttttcaggcgtttcaggctgctttcgaccgcttcttttaaaaatgcaggggagttgtcgaacaccacttttccatcgacaaatttatgcgcaccttttgtggcgaggacgaccttgtcacggccgccgtgctctttcagcacctcgccgatcagctcttccgaacgttccggcccgtaaataaacgctgtatcaagaaaattgatgccatggtcaatggccgtgcgcaccacttctttcccggtttcatcgttgagattcgggtggatattatgcccgccgaccgcgtttgttccgaggccgaccgggttgacatacaaatccgatttgccgagccttctttgtttttccatcttacctccgcctctctcttcagatttcattttttatcataacaaatcaaaaagaaatgtaaaaatatttcggtttccggccaaacaggcacatgcacggaccgtttgcatacaaatggaaacgtgtgaaagaaaaaggagggaatattgtggcaagaacgttagcttggcatgaaactttggaaattcatgagctggttgcatcccagacgatttgtttgatccagtttaaatccgtcgtgagaaatgtgtccgatgcaggactccgggaactgtatacgttttcgatccgggcacttgaaaaaaatatccgcgacctcctgcagttttatccgcaggcgccgcgggaagaggaaacagaagaaaatgaggagcggcaaaccaaccccggatttcaggccggtgaactgctgaccgcttctaaaacagctgtaagaaattatgccgctgcgatcacggaaacagccacgccagcattgcgcaccgtgcttgtacgccatttaaacagcgcgatcgactggcatgcgcgcgtattcaactatatgcatgaacatggcatgtacccggcctacaacttaagccagttgctgaacaacgatgtccggaacgccaaccgggcgctgcaaatgcgggaagaagagtgagtgataccggcgcccgtgctgcattgaatgcggcgccagcgaaggaataaagatcaaccggcacctattacagcaaataaataacgccgggaaaaaggatgaaatcagccggcgtaaatgtgcaggataaaaaaatggaaaaccgcggatcgattgttcgtccgcggtatatcctttcaacgatacagcaagccgatccgcaaacggaatggtccggatccggccccgtatccagcgggataaggaaaagccatacctgctgttttttcctgtgtttcattaccattttgccttattcagaaaccggatagccaaatcccgttgcttgctcgggcccgttcgcatttgcgctcttccatctcttattccagattgctgtgccggctcaacgccgcttcatcccccgatttctgctgtccggcaattttcaggcaaaccgcgtcaaaaaacagatggacggactggtcgaacaatgagctaagcggctgcctgctttcaatttctcccggcctccggtatttcgtggcagacggaatatggaccacgctatccgaagtttccgcaagcctcgaagacggatcagaagtcacgcccacaacagataccccattctttttcgctttttccgccgcttgcacaacattggaagtcgtgccggaaccagagacggcaatcaataaatctcccggctgaatggaaggggtgatcgtctcgccgacgacaaacacatggaaaccaagatgcatgagccgcatcgcaaaagacttggccatcagccctgaacgcccctcgcccaatacgaaaatgcttttcggagaggcaagcatatccgcaagcttttccacttgttccccgtctatttttgaaaataccgtttgaatttcatttaaaatgacttctatttccccattcatttcaatgcctcccaagtttcttttatctttcttgccgcaagcaaagggtcacttgccttgctgattgccgaaccaacaatgagcgcagctcccgccggatttccaccccgtcacatctggcctcgcggatggcggcgaataacaccgggtaagaaaaaatggcagtatcctgaaatgcattcatggtgacaaataaatgggccattggccattggtgtttcctcttttcttatttgttggaaccagatttcgtttatggattgggaccggtaccattttttcgtgccggacctgtattttttagctttagagcgtgcgatgttaagatgttttttggattttttcttttactgtatctatcgttttttccgttttggatgcttctttccgggagctctctttttcttttaatgggaccgataccattacaggggaaagctgccacttcttttctggccaatcccatgttggcatcttttcaagctatcccgcagggtttcagcctgtatcgtcgcttcttttttggtgaagccggtctcacttttccttagggggaagtcatctccccggggcagatcccctttcaatcaaacgcgtctggtaagagatcgtctgggccggcgattcgttgtccgccagccgttttaaaataagctccattactgttttgccaatttgataagtcggctgttcagttgtatacgggttggtaatatcggcaaccagcgcgcaaatcaagtagctgcggctatttttcagccctctcgccaaattattcgggcggtattgaagttcatcgatcacctgcttgattttttgccgggttttcggtgacaattcatgaaaccggccgcctaaatatcttgaaacggtcgatttcgacacgccggccttcttagctacatcgtaaatcgtaactttcgcttcttttcccctcatgttgtttaccatccatctttaaaatgaaaccggtaccatttgatttcgttataacagagtatggagagctgtcaaataaaaaatagcatcctgttatttctatcctgtttgtaaaaattccattggcattccggtctgtttttttttgaaggcttgagtcatgtttaggcgtttcctctcccgcttctcggactttctttcccgtcggcctaatgaaactcggtaattagccggcgttcttgtttgaatgttcatcctggggtctgcgttgccgtttgatataagaaaggtactatataaaatgaacttaagctttatatcaagcttaagcaccaaattgcatgatgactttatgttgcaacaggcagcagaacgacaatgttgtgttcaatttatatcacttaaaaaccaagaaaaattcgtcgagaatctctctcaacatttatgacatgaaaaagagcgtaaaaataggctcttgaattaattcattttgtttaactttattagcactctcacaatgagaacgataataattaacaaagccaaaacatttacgatttgccatatatgatccattttctaacatcctttcgattatattataatttatacgtgaatttaatatcgattgaccgtgaatacattttacctattcctgagacaaagatgacataatttaaaacaccaccaccggcaacagtcacacttgaatgatctttggaaattttatgccaattatacttttcgtcccaatcaagagaaaaggcaaaacccgtatggtctgtccattcgtgacaactctttatctcccggaaagatccactgctgtaaactctaatatccgcttttaaattaacatttgcaaatcctgtattcactgtttttgtttttctgactgtagtatagtttgaagatcttaaagctagaggttgagacaggcctaatttggaaacaggtaaaggttctgtattgttgatcgtggtttcaattgtctttggtgcggcgtcttcagtggccaagaatttatttaagtcttctacactgtcaaatttgagtacaggtgttccttctgggtattcacttatgttgatatcttttaggttatattctgtacttaaatcgtctagagttgcattatctgttacaacatcatcactaatatttgcatcattaactaaagcactaccatcctgcacgacaatgcctggattgtcttgaagtgaactaccctccacttatcaaccttacggtttgattgaagtgggggcttctcgacttatcgttgcttttactagccaacgaaaactgaccgagctaaccctcttgttccaagagttttgttacgaaattcatctcccacctactcattggtgcgattcgcaccttcacattccttgaggatgggagacttctttcggaaagacgttaaattactatctgtttcgtcagcttttgctggtatagctgaaaacagaccaactcctcctatggctatggccaatactaaacgagcaattttttcatattatccctccaatatcaatttttcttacactttataaatactgcgtcgaattgaaaaaatcctcttaaaaaataaaatctatttattaaaattttcagttaaaatttgacaaatgaatctatatggcggttatttaccacataacattccatataacctgttgtgtacttagtttttcttttccattgcacaattttgtttccactcgatctagtgatcgctatttcatcccggttttaggccgccgtatatgaaaaagaaaggggccactgaaaaagtaattttgtattttccgtgcatataacatatagcttgcaaaaaaagcgttgaaacacaaatagcggagtgtctcaacgccttttctattttggtggtgctttttcaagcgctcagtttttaaatgagtgaatcggggccgggattctgccgccgcgggcaatgaagtccgctgatgacaaggaatggacgcccattaccggcgcatggccgagcaggccgccgaattcgacgcggtcaccgacgtttgtgcccggtgctggaatgatccgcaccgctgtcgttttattgttgatgacaccaattgcagcttcgtctgcgatcatcgccgaaatcgtttctgccggtacgtcgcccgggatcgcgatcatatcaagtccgacggagcagatcgcggtcatcgcctccagtttttcgagattcaaggacccgcggttgaccgcatcaatcatgccggcgtcttcagaaaccgggatgaatgcgccgcttaagccgccaacatggccgcatgccatgacaccgccttttttcacggcatcattcagcaaagcgagcgccgccgttgttccgtgcgtacccacggattcaaggcccatttcctccaaaatatgggctacagagtcgccaacagccggtgtcggggcaagcgacaagtcgacaataccgaacggaacgccgagccgtttggatgcttccatgccgacgagctggcccatccgcgtaattttaaatgccgttttctttaccgtctccgcaacgacatcaaacggttcgcctttcactttttcaagggcgcgtttcaccacacccgggccgctgacgccgacattgatgacgacatccgcttcaccgaccccgtggaacgcgccggccataaacggattgtcctccaccgcattcgcgaacacaacgagttttgcacagccgagcccttgcgtatccgcggtcagcccggccgtctttttaatgatcacacccatatcacggaccgcattcatgttaatgccggaacgtgtcgagccaacattgacagaagcgcagacccgttcggtttccgccaatgcccgcggaatcgaatcgatcaatattttatcgcctttgtggcagcctttttgcaccagcgccgaaaagccgccgataaaatgaacaccgacttttttcgcagccgcatcaagtgttttggcaaaagcaatgtaatctttttcgtccgttgccccggcgatgagggaaatcggcgttaccgagatccgtttgttaatgatcgggataccgtattctgattcaatctcttccccggtttggacaaggttttctgccaatcgcgtaattttatcataaatcttccggcgcgccttttccccgtccgcgtcaatgcaatcgaggagcgaaatgcccattgtgatggtgcggatatcgagtttttcttcttcaatcatccggatggtttcaagtatttgtttcgtttccatgattttcccccgtttttacaagctgtgcatcgattggaaaatttcctcgcgctgaattttgatttggacttgcagtgcctcgcctttttttgcaagggcatgtttgatttcatcaaaattcgcttcagcattcgacaaatccagcatcatcatcatggtgaaatacccgctcatgatcgtctggctgacatcgagaatattaatcttcagttctgccagctgtgtgctgacaccggcaatgatgccaacctggtctttgccgattactgtcaaaattgctctcattttgtccactcctgttttggaaaaaattcatatccttactatcacaaattttgccggtcttgtctatgtatacttttggagagctttttgcgatgttaataacatcgcaattacctcttggaatttttcactaaaaaaacagggcagcaagttgaagctcccctgctgcccttttcaccgtaaaaaaacgctcgcagacttttcatctcatacgggaccggctccgcaagccgttcttccgttgtgcagttctcatctgcttttaccggccatactcccgtttaaatggaggcgccgcctgcaaaaaccctgcgttcaaaagcttttcttccgacgcccgggtcagctttcgtagctgtcaatcatattcgcgatatgcgtataggcaccccctgctgcgagcgcgcccgcaacaaggatggcttccgcaagctgttcttccgttgcgcccgctttttgcgcctgtttggaatgatagtcaatgcaatacgggcactcggtaatatgggcgaccgcaacagcagccagttctttgacaagtgcgggcagtttgccggctttcatggaagcagcaccgaacgcattgtaggccgcaaagccgtctttggcaagatggttcatgttggatagttttttcatattggattttttgtaaatcgtatcaccggcatcttcaatcagggcaagctgcatatggacactgtgggccactgcgccacctgcttccagcgctgctgccacaaatgccgcttctgtaagttcttcgagactggcaccggccgcttttgcttttttcgtatgaatgtcgaggcaatacgggcattttgtcgcatgggccacggcgaccgcaatgatttctttgtcacgggcggaaacggcgccgtctttaaatacttcggcattgagacggtcaaaagcagccgcctgttccggcgcaaggtcttttaatttcgatagatgtttgagcttatctttttcataatacgacataaaggacactcctcccaattggaatacttgtttttcattatagcccttccatccgaaaatgaatattcatctgcttttgtgtggtaaaatgggaagaagatgaatatcaggatggtgatggttttgtttgattttgatacagtcattgagaggaaaaataccgcttctgttaaatgggaacaggtcaaacaggtcttcggggaggaagatgtgctcccgatgtgggtggctgatatggatttcaacccgccgcatgaagtggcggaagcgattaaaaagcgggttgaccacgaaatcctcggatatgcgtttgtgccggattccactgcagaagcgattcaggcatggctgaaaaagcgccataactgggacatccacccggcgtggatcgcatactgcactggcattgtgccggcgatcagcacagccattcaggcatttaccgaaccgggcgataaagtgctgctgatgtctccggtgtaccatccgtttttccatatggttgaaaaaaacggccgtgttgtcgcaaacgcgcagctgaagcttgtgaaaaaccggtttgaaatcgactgggagcaggttgaagcgcggctaaaagaaggggcaaagctgtttttaggctgcaatccgcataatccgggcgggcgcgtctggacgaaagacgagcttgtaaaaatggcggatctttgcgcgcagtataactgtttgtttttgtccgatgaaatccactccgaccttgtgtacccgcctcatacccatgtgccggttgcatcactcggagacaagtaccgcgatatgaccatcacctgcattgcgccgacaaaaacgtttaatctggccgggatcaaagcttctgccgtcatcattccaaacccggaactgcgcaaaaagttcaaagatgtgcaggcggtaaacgggacatccgcgttgaatacatttggcattgtcggcatggaagcggcataccggaacggcggtgaatggctggatgcgctcctcgtttacttgaaggaaaatattgatacagcggcacgattcatcgcggaacgcctgccggaaatccgggtaatggaaacggaaggcacgtatttaatatggctcgactgccgtgcatacggcctggaagaagaggcattgaaggaccgtttatggaaaaaggcaaagctcggcgtcgaaatcggcagcaaattcggtcctggcggagaaggcttcatccgcatgaacatcgcctgcccgcgtaaaattttgatggaaggcttaaacaggctggaaaaggcctttgcctaaggaaagaagccggcccaaaaaactttgggccggcccgggttttgggcgcttacaatgcgggatgaaggagttttatttggaagggtcagtattttctgctagccctaaatattgttgccgttaaaccggatgttattgcttttttcaaggtactggatcgtttcttgcacgtttgctgttatcaattgaagcaggatatcagccttttcttttgatgtagtgaactaccctccacttatcaagcttacggtttgattgaagtgggggcttctcgacttatcgttgcttttactagccaacgaaaactgaccgagctaaccctcttgttccaagannnnnnnnnnnnnnnnnnnnnnnnnnnnnnnnnnnnnnnnnnnnnnnnnnnnnnnnnnnnnnnnnnnnnnnnnnnnnnnnnnnnnnnnnnnnnnnnnnnntttcggaaagacgttaaaaaattttttctcaaaaacggaccggcttaaaaaatatacaggccttgtattgatttttatgaccaggttttccttaaccaattgattcaggtatgtgctgaccgtattgcgtttgacatggaatactctctgcatgccgttcgcagttaactgttctgagggatgttcccaatcaaatttttcagtttctttacttaagaaaccaaggtgtcattttttaaagacattccatgttcactcccttcgtatttatttcaaaaattttatcctcatcatcactcgtattatagcagaagatgcggaaacttttcggcaaaatccgatgaaaatatttttcatattggaataatcaaaaaagtatgcagagcatttgccaaaattcttggtttttcaccattattctagaaaaaattttctttcagactatgaagagtttggttatggcaaacggagaaatatagaacagtcaaatggagaaaatgcatcggatggttggggtatgaaaaacagccggcataagttttcaagcgaaaaaaaggaaaaaagcaaaacacaaatgaagtagggcttgctgaatgcattcatccagcaagccgggacatatattaaacccccttcttaatgaagcagggggtaaggcgttttcaacaatcgctacttttttgatttgcccatttctataagcgtttcaactcttcctcaatcggtgtatctcccgaaatgaggtcgaatgctttccggtatgttttcggttcgtcgaggcttgcgagaatggtgcgtgcgacgtcttcacgcggaatggtgccgcgttttaagttttccgacgcttcgacttttccggtgccgggttcgttcagcaagccgcccggccgaatgatcgtataattcagcttggttgactggagcacgcggtctgcataatgcttggcaacataatacggcttgatggcctcgctccagttttcgcggtggtgggcctggagcgcactcacgataacaaaacggctgatgcctgctttttctgccgcctccatcgttttcaccgcaccgtccaaatcgacaagtaacgttttgtccgcgcctgtgtgcccgccggaaccagcggtaaacacaatgcaatcgcatcccttcgccgcttccgccagctcatcgacagtaccttccaaatcggatatgaccgcatctacccctttttgcctgaaaaattgggcctgttcttctttccgcaccatggcgcgcgggatatggcggtcacttttttgtaaaaggtccacaaggattttaccgatcttgccgtttgcgccagcaacaagtactttcattcagtccatctcctttcgttttcttccattatttcaaatagaaaacggagaagcaaatgattaagacggggcgtggatgctgcatacttagggctggaacttctattgtttccccggcaaagcaaaaaatccgcatctttccgcggattttcactccataatggacacaccttttttagaaatatgaagcgcaagcggggtaatgcctgccgcttcccatgctgctttcaaggcggcagctttctcttcccccgctgcaaatgcaatgccgcagtctccgccgcccgagcccgatgattttccggcaccgaaacggccggcaatgtctgcaagttgcttcaatggcgccgtttcaatggcggtgtgggctgctgcttcaagcttctgcaaagcacgccggttttgccggatactttcaaatacgccggccgcatcctgctgcatgaaactttccgccagtttatccactgcggcggtactttcttgcaaaaatgccgtgtatgtttcggttgccgcctcccgcaatttgccgatacgctccaccatcggcccggttgccaccgctttcccggtccagcctgtgcaaaaaatgaggcccgggggaagttccaaattggaaatggccaaatgcggccatgtttctgccagcaattccgaaatcgtgcagcccgcttccaaccgggaaaaaatccaatccggcctgaatgcggcatatttcagcatgccgccgtacacggaagcagcaagatccgcgccggacccgttgccctgtgttttcagatgggccacggcggccagtttaaaaatcgcttccttcgtatccggcatcccttgatgggcatgcaaaagggcggcaaggacggcagaaagaatcgctgcactggaaccgagcccgtatttttgccctgttgcgggatcatccaattcactcgttaccgtgatgtgaagcgggcggagcggtatcgatttttccataagcagccggtaaaaaacggcgagtgcattttggataaaccggagtttcgagtcatcgtggtcaaagcggacttccccgttctccacacgccacgctgcatgcggaatgccaatctgcggcaaagaaaaaagattctccgtgctttcttttacctctattgtgatgtaccggtctaccgcggcaaccacagcagggcaaccgggttcaatgaccgcatattcgccggcaatcatcaatttgcccggcgcctttacttgaaattgcatcccgttcatctctttcaatcctttttaggtcggtttacccgtcaaatttgcaaacatcgcgtccaatgcccgcctgctgcacccgcttttgcggacacatcctctgtctaactggcgaacggcaatccgggcgtttcccgcgtcaaaagcaacccccaaggtgtttccaaaagccgtgtgaaaagggttccattcgcacagccgcaatccggttacgggcatggcgccgccaaatagcgcgaaacaggccgaaatggtttttcagccgcagctgcagaaggaaagcggcattttataatcacgaaagaaagccctaacatggatgttttggagcttccctgccggcgttccaaagtcccggaaaaaattaaaacgggccgtattgaatgcccggacccggatggcaaaccagcacttcgcggacggacgggacggctgcaagcgcattgtacaccgtctcttcatcttttcgttcacacagcacttttacattcggcccggcgtcaattgtaaaataagcttcaatcccgcgttcgcgcaaaagcgccacttcctgcataacatcgagcgtcgcactttgccagtataaaaagggcgggtcggcgctgatcgttgtcgcatgcatttttaacgcattggcttcaagcacgcgccccaaaagcgaaaaatcgcgcgctgcaatcgcggattttgcggcggccaaatctttttccacggtttccatccaggctttataaaacggcgacgtggtgaccgtccgtttcatcccttccctgctcgaaatttttttctgctttgattccaccaggcaagataaaatgctgagattccaatcgtcttcgccaagaatcggaaccgcgtacgaatcggaaccatccgctttttcacctttttgccactcaacaaaaccgccgtagatgctgcggcaggcggacccggaaccttggcgcgccaagattgacagcgtgcgcccgtccacctcaaggccgagcgctttaacggccgcagccgcaagcgccgccatgccggatgcggaagaggcaagcccggcagcgatcggcacttcgttttgcgattctatatatgcatatcttttttctcccgcaaatgccctgatcttatccataaagcgggaaattttcgctgtttccgcatcaatggccggttttccgttcaaaaaaaacacatccgcttttaaagcgggatcataagccacctttgttgtcgtataaaacctgtccagcgtaatggacaggctgctgttcatcgggagaaaaagcttttcgtcccgtttcccccagtacttgatcagggcaatattcgtatgggccctcgctgttgcctccatctttcatcgttccttccagtcaaaatgccttcctgagagagctgctttgaaaagggcaccgttctgccaattctattcccgctgccggacaaaaaagcgctttggccaactgcctccaaaggaaaatgcctcaaacattttatggcaagaggcaactgcccgcgattccccattctcagcagccttcgcaccgctgccggataaaagggcccctttgccagccgctttaacggaaaatgccttctcatgatccgcccggcttcaaagggccaccttcttccttcccatcactgtcggacaaaaagagctgcccgctacaagcaaaaacaggtagcctctttccatgaagcatctcctgtttacggggctgtgctatcatgtttctattgcgggatcacggtcatccttccagcgaaaattgccatacttgcgcggcgcctgctttttgcagggcttgggccactgctgaagcttttttcctgctttcggcgagcgaaataatgcagccgccccggcctgcgccggtcagcttggcaccgagtgcgccggctgaccgtgctgcagcgcacaatgtgttaagcccttcgtcgctgacacccaaaacggaaagctgtgcatgtgcttcattaaataaacggccgagatgcaatccgtctttttcaatcaatgcccttcccgcttcgtgcacgatttcgcctaaacggctgatggcggactccaccgttttcgggtcagaaccgcttttttcacggatgctcccgaccgccattgccgtattatgcacgcgcccggaatcggcgaccaccagataaaacggaagcgaaaacggaagcggccgggccgccttccctttttcaaaccagatcgggtcattgctgatgactgccatcatatcgatgccgctcggattcccgtgggcaaaattctcagcaatttggacaaaccgttcaagttccattttcgttaattgtttttcaaaaaaagcatatagcccgcggacaatggcaacggcaacagcggcactcgagccaagcccgcgcccgatcggaatggtcgattccagtttaattgccaaattttcggccggcttttttaacgtacggaggatttctttgacacatgccctgattccgtgaagcctttccggcgctttatccagcgcccctttgtaaaaccggcagtcaatggagagcgggccttgtttccggatgactgccgtttcaattttcacatgatcgaatggaagcgcgatcgccggttgcccgtaaacgacagcatgttcccccgctaaaattaattttccgtgtgccgtcccggttgctgtattgccgggaattttcatcatgtttacccctcgctttcccttgccagaccgatgcgcggttttcgggaaaatttttttcaaaaaagcccttcattgtgccgctccttaaaaggtgccatacagcaaaaaagtcatctatgttatccagcggtgaaggagtcgctggcaaacctgtttatcctattcaatccagtatcgccacttttcgacaatgcctattttatcgcaacaggacgcgtgatgacaatggtttgggccttgagcatatatatgaaaatatgggccggattcccgaaagttccaaaagaaaaccggccgttggaaatccagctgtaatccggtacttataaaaccggttcgtgcgaaattcacttaagggctgtgtccgtgcatccgccttttgcgacggatgtggaaagattgctgtgcccattcccgtttctacaggtgatgaaacgagagaatccattttttaaatcggtgccaaaaaataaccgctcatggttgtgaggctatccacaaacagagcgatcacaggatttatttcacggtatcgtgattccccgtccattctatcgaaaattgatcttatttgcaataaaagcgcaacgatttgaacataatggaagtgataaggaggatgttttgtgaaagtcagcgtcatacttcccgtttacaatgttgcaaattatttggatgactgcatggaaagcctcgcccgccagaccttgccgacttatgaaatcattgccgttgatgacggttcaaaagacgggagccggaaagttttgaaaaagtgggcagcgcgcctcccgcagctgaaaatcatccgccagaagcatagcggcgcaccgggcggcccccggaacaaagggcttgcgcttgccaccggcgattacattcattttcttgatccggacgattatattgaccatgacttttacgaaagttcatttgcctgcatccgcaagcacgaccccgatatcgtcgtgacgaatagatacaaattcaattccaggcaaaaatggcaggtgtatacgtttaaactgctcgggctgtttgaggaaagccggctgacaaacttgtacgaaacgaaaaacctgatccataacctggggcctgccaataaaattttcaaacgggattttttaacgcggaacgggcttcgttttcttgaaggctgccgttttgaagatgtccactttatcacctgctgcctgtaccttgcaaaaaaagtgttcatccattgcggcacgcattaccactggcggaaacgcgaatctttgcgcaatttgtcgattacgcaaaagaattttatgttccgcgctgtcgccgaccgggtgcgcatccaccgggaaattgatcggtttttaatggcacaggggctgctcggccaccgttacattaaagatatccgggctatcctcgattttacgcgttatgcttcgaatttgtatcgctacttgccgcatgcccggcgccgcttttttccgcttgtaaaccattatttgcaggacattgacgagcgggcgttcgactatgtgccggaaccggagcttgtgcgggcgcgctattttttcctgcgcaacgggatgccgtttgaatttgcggcaacagcaagcgtttcgcgcgggtacttgccggtaaccccggacggctgctttgatttccgcgcttttaaagggaagcatgctttcgaccatctgcttccggattctgtccgcgtgccgccgggtttgcaaccggaaaaagcggaactgcttgccgcagatttatgcaaccgcgccctttctctaaaagggttcggccagatcggctatgtgccgcctcgctcaaagcaggacgcgggcatcacggtgattttgcaaaaccgcaccacaaaagaggagcggcggattccggctgtgatccggctgttgccgcaacgaagaatgcgctttgttgctgctgttgatgtggcgcttttggcggactggcttgctttacagcagacggcggatctttttctcgagatcagggcaggcactttgctgaaaaaactccgccttcatgccgatccgcatgcgaaactcggaaactatggcagatgcggaaagcttacggtcacgaagtatggaaatgtttcgattgtcccggctgcggtggagcagcggaaaagagcataatttccatattttggttcgttttattttgtgcctgccgggaataggaacagtgcaaggccaatacatcttaaaagaagggactggtaaagtttttgatgaaagacttgacagcaacttcatcttccgtatttggcactgcatttgtccaccgggcaagtgggacgaccgtccggaaccggtatactttcggtgaaggttcgtgtccgcctactatttgaagccccggacttatctgaagccaggtttggataagcccggactgaacgtcatctgaatatcaaatttggatgaggcaaaaggcgcaatccgatcgggttgcgctttttgtccgtgtgctccctgtccctggtatgctttggaaatcccggcatttgcctgcagcacaatcgctttattccccgcccggttcatgttagcatgaagataggaatacacgtgatagaaggaaagcgatacgttgaggtgaagaagatgagtggaatcgttgggtacattggcagacattcggcacagccggttctgctcgattgcctgaaaaaactggattaccggggctatgattcagcaggcattgccgtctccgatatgaaaaccatcggcgtccgcaaagaaaaagggcgcgtcgaagatctggaagcttccctccagctcgaaccgattcccgccggatgccttgggatcggccacacaaggtgggcatcacacgggatgccgaccgttgaaaattcccatccgttatgcgatgaagaagcacgtttctacgttgttcataacgggatcattgaaaactaccagcaattaaaaaaatttcttatcgcgcaggggcatcgtttacaaacggacaccgacacagaagtcattccgtatcttctcgcgcattatgataccggcaattttgaagaaaccgtgcggatcgtcattccgcaattaaaaggtgcgtttgcgcttgcaatcatggcaaaagatcacccgaaccagattatcgccatttcttatgataatccactcattatcggctttggcagcggggaaacgtatctctcctcggatatcccggcgctgctttcgtatacaaaggaaatttatccgattaaaaacggcgaaatggccattttgacccagacaaaagtggaaattaagacactttccggggagaaaattctgccggaaaagacatccgtgcgctggaatcaagacgaactcaacctgcaggattacggccactacatgttaaaagaaatcatggagcagccggaagcgattaaacgcacgttaaaaaaccggttagcggccggtgatgtcattattccggaagtcgaggaatttttcaaagaacagcagcttaccgatattgaaaaaattaccattgtcggcagcggcacctcgcaccactccggcatgatcggcaaaaagattttggagacgatgctggatatcccagtcgaagcggcgatttcgtctgaattcagctgcgaacacggccatttaaatgaaaaacatcttgtcattgtgatgagccagtcgggggaaacggcggatacgatttcggccttgaaaaatgcgaaaaaattcggggcaccggtgattgcaattactaattattggaaaagcacattgggaaggaaatcggactgtctcatttatacacatgccggtccggaactcgcggtcgccgcgacaaaagcatacaccacccagatcaccgcactcattttgcttacgattgtgctgacgaaaaaactgaacggccctggaaaggataaaattcctgtcctgcttgatgcccttcattcactcgccgatgacgtggaaaaatgcctggtgatgacgcaggatgccatcgaccagtttgcacaggtcacaaacgaccaggagcatctattcctgattggccgcgggctcgattatgtgctggcgcttgaaggggcgctcaaactccaggaagtcgcctatctccatgcggatgcctacgcggcgggagaaatgaaacacggcacgatggctttgatcacgccgggtgttccggtcattgcccttgccacccaggaacatttgcgcgacaaggccataaacaatattaaagaagtaaaggcacgcgatgcatatgtcgtcgggattacgacgacgggagatgacgaagtgagcgccgttgtggacgaagtgctctacattccggaagcacacccgtttctcatgccggtcctggccgccatcccgctgcagctgcttgcttattatgccggcatcgtacgcggctatgacgttgaccgcccgcgcaacctggcgaagagtttaaccgtcgagtaaagggaaatcgcgtgaaactttttcagtccatgcctttcacacaaaaaccgcccgggaaaaggatcctggcggttttttctctttcggggcaggctcccatttgattttttatcatataataagcattataaataattccatttctttttgtttacagcaataatccctaatctatattgattcccattctcaattattcaaaaaaatttatattaattgagaataaatgctattctttttcctttcttcgtgctacaatacaggtgaaataagtttactcaggaagaggtgtgcgatgatgccggaatatgattatcaccaccttccgcatgtcaaagtccagtccgcatcaaaaaaagcgttatgggcaacgcttgtcctaaccttgtttttcacgtttgttgaaatgatcggcggcctggtttcgcattcgcttgctttgctttccgactcggcacatatggcttcagatgtcattgcgctcctcttcagcatgcttgctttgtttatggcgacacgcccgccaaaccgcaaatatacattcggctatttacggtttgaaatcgttgcatcgttcctgaatgggattgcgctcatgggcatttcaatcggcattttcattgaagggattaagcgcctcgtccatccgcaacccattgattttaagtggatgtttctcattgccatgaccgggcttgttgtgaatattatcctcaccattgtgctgcaccggagcacaaaagaagaagaaaacttaaatgtcaaaagcgcattatggcattttatcggggacttattgaattcggccggcgtgattgtttccgccctgctcatttattttacgggaatgaatttctttgatccgctcatcagcatcgcaatcggcggcgtcattttttacggcggcgccaaaatcgtccgcgcttcctatttgatcctgatggacaccgtgccggaagggtttgatttagagcagatccgcacagatatgtatcaaattgagggcattgaagacgtccatgacatgcatctttggaacattacttccgaccattgttcgctgaccgcccatgtctttgtcaagcattcatctgaaccgatgcgcgtcattttagctgtaaatcagatgctcgaacaaaaatacggcatccgccatacgaccatccagacagaagaccccgccatccatgaccataccgattatctccggcagaaaaaccggactgtttcactgtagctgctgctcagcaggtacagtttttttgttttccagccagacaacccatttgtaaaacccggccacaatgagcaggaggaacggatttacgagcgccgaaatggtgaaatcccaccatccgtaatgaaaatagccccatggtgccggcagcagggtgatccactcataccccagcataagcacttcccaaacagcaatataaagtatcttttttggccatctttttccaaacggaaaccagttaagatacaaaatattcacaggcggaagtaaacaaatcatacccgggagattctcccagtccaccccttttgtaaaataccagtagccatggtacttgtagtcgatatatagatcacaaaccaggtggaaagctatgatgaacgtccaaatctgtacgatctgccccggggaaagccgcttattggcacaaaaaacagtcagattaaaaacaatgagggaaacaacatacccaatcatgtttgatcctcgcaatcgatgaagatctttttccggcgggcttcaagcaaagtgccggtcctccggctggcatcacagtttacggactaatgcgctgcctcgcgcacgatttgtgccgctgtttgtgcatccacgcgcaaaaaggaacaaagcgcttcatctggcgcatcccggccaaaaagcaaatagaactcttctatcgctttacggtgcgcatctttactggtatgcccgcaaacctggcagtgccacgcgccattgttaaaatccatttcaaaacggcggcacagcggacacccgacccccgtatacatttcactttggtcaaccggccacggacagatccccggatttttgcggcattccagcaaatgcttgtgccattttttaaaatgcttgccgtccaggaccagctggctgtatgtttccagcatctttgtcactttataaacagcctggcttgctgggcagatcctcaattcatctgctgaattgacaacaggcattttcaactcggccccctcatggcaaaggacaagcaaatactccagcggcaattcgggtaaatgccgcatccgggcccatgtacacaagatttctctttgtttttgcaggcacgcaaacggttccggccagcctttttccttcccgcctttttgctggataagctgggcaaaagccggatccggaaaaatcgcgccggataaatgattgtagcctgtaatcaacacaaaatttcgtgtgagaatcaacccgtccaggcatgtgtttgttatggggagtgcatggtaaacatagaattggccagacggaagaatctccaaaaaccggtctgcccgcttctcccttttatattttgcatcccacttttttacatccctagcaatctgcccatacagcggatgcctttcgggcagcctccccagcagcgcctctcccgcccggatttgcgcggggtattcccgctgttttacaatcacgtccaacttccccttttttaatgattttttttattttattcgcagtgggagaataaatatgttaaaattaagaatattgtggtgggaggtgctgtttgtgcgtctgtattttgatcggtttgaaaatgaccagcctgttcgttcctgatgcgggggacgaacagccgcttcgaaacccccgtctggctgttagataaaaaataaagacggaggttgatgactgtgaaaaacaaatgggcaggcgcactttgcctcgcgcttgcatccggcatctggggcgggatgtatgtggtcagtaaatatgtcttgaactttgtaccgccgcttacgcttttatggttgcggtatatgatcggttttgccgcactgtacgcgctattgcatgccggcagaaagaaaaagggaaaggcaagccttgcaaaaaaagactggctgctgcttgcctggatcgggtttgtcggctattttgcatccgttgccatgcagtttatcgggacgcaaaaagcggatgcccataccggcgcgatcatcacgtccgcttctccggtttttatcgtgatattcgcgcgcttcattttaaaagaaaaactgaccgcacgtaaaatgctggcgctgattatcgcatcagcgggcgttgtcatcgtgatcggctgggacatccatcttcaaacctatttttggggcagcctgattctggctggagcgatgatcacatgggcacttctgtccgtttatgtaaaagtggcttcctggaaaatggattcgttaaccattacaacatacgccattttgttcgggctgctgtttacaacgccttttgccgcccgcgaagccatgatggcctggcctgtatcatcgggcggtttttggggaatggcaggtattttgtatctcggtgtcatctctacagccggcgctttcttcctgtggaacaaagggcttgaaatggtagaagccggcagcgggtcactttttatgtttctgcagcctgtcaccggctcttttctcggctggcttttgcttcatgaaagcctgaacggccgcttctttgccggcggcgccctgattctggctgcgattgccatttcattgctcccggaaaggatgcgcctcgtgccccggatggaaacgcaaaaaaatatatcggattaaaatagcagcataaggcaaggcctgccgcatcggtcttgccttttttgtttctttttttgcgaatttgcaggaatttttgccgcttttatcgaaaaaggggataaaaaggttccgggaggcagaacaatggatcggtacagttgcttggcatatcttttgtttcaaactggtgatggcacggtaaaagaagcggcaatccgccttgtacagggcagccttacgcttgaggaagcaaaagcagacagcacgctcaagccgtatctggaagcatgtgaaaaacggctgaacatacagccgccggatgccgggctggtttatgcatttatggcaaattacgtatacgccgtttaaaatctggcagggcaaaccggcggacttctaaaaggcataatccgctttgctccgaaagcggattgtgccgccgcaaaacgtacgccctgcctctcctagtggttttgcaagttttgaggttcgtccgcagttataggcaggaagttccgttacagaaaacttataaaaagttataatttcttacaacttttatgtttccttacttcttcatcgtgtctgctttcacgtctatctattaaacagatcgctacttgcatttggtgtaacactccaaagtcgtaaattcccgactaacgaatcggtacatgtctacattaacttgcattgttaaaatacagattctaaaacattctcaccatattttttaagatttatagacgcttgataatctcggtcaacaatatttccacatccgcattcaaaagttctatcggataacttcaagtcttttttaagttttccgcagcaagaacacaacttagaacttggaaaccatctatccgccaaaatgaagcgaatattattccaattcgacttgtattcaatttgtcttctaaattcatgaaaacattgttgttgaacagattcagctaaatgtttatttttcatcataccttttacattcaaatcttctaaaacaataaacattggttttctgtttacgatttcagaagtgatttgatgtatgtagttatgacgaatattcgttattcttcgtgaaacttttaaaagttgcttttcactttttataatgctgcgtgttttcttataacgactaccctccttattcatttgataataaattataaagtcaacaaaaattttaataactttttataagttattaaaaactgtttaagccccctgtagttttgcgtctccatttttcaatggatttgcccctttgatataggtcttttatcctattatactgtatttctgtccaaaagaaaccgtcagtcaaaggataagaaagggcaattcggttaaaatttgtcgtctgcagctgccggaaacgtttatggcgggtccgccaacgcccccgcctcatcgctgaagcaaggggcgtggatgcggcatgctttccgctgttttacgccgaaatggcacgcgctgtcctgtgcttttcagcggccttgcgttttgccggatctgtttccggcatgttaatttacgaaccgctctgtttttccgagcttttcccagtattcgttacgcaggcggactttctggatttttccggatgccgttttcggcagttcctccacaaatgtcacacccgtcacggctttgaaatgggcaagcctttcccatgaaaaacggatgatatcttcttcagtggcggccgcatctgccttcaggacgacaaatgcatgcggggtctctccccatttttcatgcggaacagcaatcaccgccgcttcaaggatatccggatgttcatacagcaccccttccacttcaatagaggatatattctcaccgccgctgataataatgtcttttttacggtcgacgatatcgatatagccgtattcatcaacggtcgccatatcccctgtatagagccgcccgttccggatcgttttcatcgtttcttccgggtttttccagtatccgtgcataacgccatgccctcttaccgtgacctcaccgatttcttttccgtcatgggccacttcttcgtcgttttcccgtaaaacccggacatcactgccgatcatcggaaacccggctttcgcccgcaaccgcaattgtttatcatgatccagcccgccaagctgcgaacggatgacagacacaagggtgagcggtgtggactccgtcatgccgtacacctggatgaattcccagccaagctctttttccacccgttctacaaatgcaggcggcggcgcagctccggcgatgacaacacgcacatcctgttcaatggcgggatggtgttccgcattgtactgcaacaggctgttcagcacagtcggcgccatatgcaccaccgttacatgatgcctgatgatttccgtgaaaatggcttccgccgacggtttgcggaggcatacatgggccgccccgtttgctgtatagtaaaacggcgaaccccatccgtttacatggaacatcgggagcacatgcagatagacatcgcggtccgtaacgcgcaaatggtgcatggcgcttaatgcatgcaaataattattgcggtgggtaagcatcacgcctttaggatttccggttgtcccgctcgtataaagcaggctgcacacatcgttttcatcgaggccggcacgcggaaacggctcaggcggaaatctgtccagccaacggtcataatcaatttcagcacagtcatcctctttatagtggataataatttgctccaccgtttcaagctcatcctttaccggctcgatcaaatggtacatctcctggtccacaaacaatactttcgatccgctgtgatttaaaataaaccggtagtcttccggggtcagccggatattcagcggcaccatcaccgcccccagctggaaaatcccgtaaaagccttccagcatttccactgtattcggcgcgagataggccacccgatcccctttttcaatgccaagattttttaacccgtacgacagctggttcaccctgccgttcagctcccggtatgtaaacgcccggtccccgcaatacaccgctgttttcccgccgtacaaaagcaccgcgcgatccagaaattccgtcaacaccaacggcacgttcatggactcccctcccattttcattttctccctgtttccccttgatgtttaaaaaccagcactgttatataacaatattataaaagtttttgaacgcgttttcaatcatcatatttatttgtttttttataacatcggatgatcttcttttcacttcgtatgtgtaaaattttactcgcaggggcagatgagtcgaaaaaaaataggaagacactctatcatctaaatgtacaccatgaaatgaacatctagagagaggtcttcccatggatattatatcaataattgctggattattaaaggatacaaagagtcttattgaatttgaagaacaggttaaaattctgatgcaaaaagtttttacacaatgggttggggacgtatttgagaagaatgaagaaaagggggatgcattggagtaaagctggcgccgaagccatggtaaaggtgaaacagggcatgcttaacgggacattgcaggaaacctatctgaaacaccgttcaagaagcgcgagaaagcaacggagcttgcaacaatccatcaggatgtctcaacgattcaagcagcctgtacgcccgtcaatcggcgtaaagcacggatcagtttccctgtattcaagccgttcatcggcaatggggcatttaagcaaaatagtagagctttcgttttaagcctggtatgtgggggactgattgttgatgcgcgcgaaatttacgagactcctgcgggaaaagcgagccaggagagaccccgcagcgaggtacgagcgaggaggctcgccggccgcccgcggaaagcgagtgaatttcgcgcgcctcaacatccccgttatccatctttatacggaaatattacatcttttccgaaaattacaccgagcaagtaaagcacggtagccgaaagtgtacaaaaagagtgtcttggaatacccgatatttaaaccttgtcgagaaaaacttgacacatacttactaaaaaaaacttgacacatacttttcacttcttttatctttgttttcgcttacatttttaatataatgagagtgtagaaagaaaaaaatgtttaggaggcagtacatgttatgaaaattcctgtaaaatccgttacatcgccgaaaaagtttatcgtagggaacggcctgcttgccaatttatatgcgtacataaaagatttgggcgacaatgcctatgtgatttgcgacgaattcatcctcggccgcgcaaaagaagaagccggaaaatctgtccgggaaggcggtgggaaagcaactttcgaacagttcaattatcaaatcacccaggaagaagtagaccgtaaccgccggcttgcacgtgaagcaggcgccaatgtcattgtcggcatcggcggtggaaaaacgcttgataccgcaaaagcaaccgcttattatgaaaaacttccggttgtcatttttccgacgattgcctccactgacgcaccgtgcacggcccttgccgttctttacaaagaagacggcgcttttgaccgttacttgttcctgccgagcaatccggatgtcgtgctcgcagacacggaaattttagctgcagcaccggtccgctttttcgccgccgggatcggggacgcgcttgccacttattttgaagcgcgcgcctgctacgcggcaaacggcgacaaccttgttttaatgaagccatccctcaccggcctggccattgcccgcacttgctacgaaacgattctcgaaaacggcgtaaaagcagtggaagccgtgaaaaacaaagtgccaacccgtgcagtgcaggataccattgaagcgaccatctatttgagcggtgtcggggcggaatccggcggccttgccgcagcacacgccatccataacggcatgaccgctgtccccgccctccatcgtgcacagcacggcgaaaaagtgacattcggcctgctcgcacagctcgttcttgaaaacgcgccaaaagaagagcttgaaacggtaatccgctttatcaaagcagttggcctgccgctgacactgaaggacctcggcgttgaagaatttgtggaagccgaatggcggaaagtggcggaagatgcctgtgccgaggatgacacaatgggcaacgaaccattcccggttacgcctgatgatgtgtacaatgccattgttgccgctaacgccattgctgaaaaataccatgactaaatcaaagcagcttatatgaacccataaaaacggcgggaaaacacgattgtgtctcccgtcgtttttatttatcaccggatgctttcattctgctgttggagccgttttaaaagcggcatggcggacaggtgcttgttccttttcaatcctttgatggcgcgcacgggcttctatcccgaaacatcgagatggctggtgttcattccttttctatcctgaaaaaatgcgatactgattttcattcctttactggtgcagcgtttatccggcgtggcggcaatctgatcgcccgctttttcaagtatgcccgtgttttcgggcaattgccagcagccatgatgaatttgcttcattttccggcacgtacccgggacccctttccgtctcaaaggcaagtctgaagcggcaagcagattattgcggatccgttaaggcgccggtcccggctgcatgctggtaatcttccgccggttcccatcctttgcagacatccacccatttttcggccttcccgtatgtatacaattcttcgcaggtcagttcaattgccgagttgccgctcccgcatgccggaaatacagtcgtgaaccgtttgagtgagacgtccatatagaccggcaaatcttttttcaaaccgaatgggcagacgccgccgacagcatggccggtatgctcgagcgtttcttctggtgacagcatccgcgctttcccgccgaatgtttgccggaattttttattgtcgattttcgcatctcccgcggtgacaacaagaagggcttcttccccaccggtacccctgaacgcaagcgtttttgcaatccgttccgattccgtgtgcagcgcctcagctgcaagttcaaccgtcgcgcttgatgacggcaggacgagcacatcttcttcccggtcccactgcttaaaataagctttgacatcttccaatgacatgaaggcgacactcctttttgtgaaaattttaaccctattgtaacggaagccattccgggttgcaaacgggcttgccaagtttttcgccgggcacaccggctgatttcccaaagatgggcgctaatcttcatccgtttttcagcgggcagtcccttgcatgcggctgcgaaagaaagacaaggcttcctgctgtttttcaggcttgcggtatgcttctccaagcagcttttccagccactcgcttttttccgatgcagaaaactgcggctgcttcagaagctggcggcactcgtataaaaaatccacatattgggcgtagttcgtatcataatgcccggataattcatttacaatgcgggaagccagtttcgggcttgccccggctgtagagacactgatagaaagcctgcccttttggaaaaacgccggaaaagcaaggttgccgcttcccgcatggccggcatcgttcacgagggcttgggccggggcatgggcaacaatccggctgtttgtctccggatcatttgtcgctgcaacaaccacatcggcctcccggatgtcttccggttcgaatgttttctgtttccaaatgaacgcgtgttgttgcgccaaaacctgcaattcatcgttcaggtgcgggctcacgactgtaacgcatgcccccgcttcctgcaagagccggaatctgcgtgccgccacttttccgccgccgatgaccacagcctgcttcccgtctaaattgaccataaccggtacccaaaccattcctgatctcctttccagtttatccggtgcagaaacgcctcgtgcttcctgccattttcgtgaatgtgcccgtacgctccctttccagcgtttcctagagagccggaaccgggcaagtgccggcatgcgcaatggagcgccggaccgcgggcatctttcaggctgatcgggcccaaaaaagtgccggtacgcacattgaaacaccgcacccaggcattttttaactgcatctcccccaaataagggaggggttcacaatagaaaacgccgcaggcttcccccaggctttccgggggcaaaaaaggtctcggaatctcaaataaaagcctctgcacccaacgcttcctttgcccggccggccaatgcgtccgccatatccgggtgacagccgagataccgtgccagccggatatcatatccttcccgctgcagcatgcccactttcttttccagcgaccggacgagcacgccggtgaaccaaagatatggggccacaaccaccgggcgcccggccacggccagctccttcagcgcctcatcaaaacggggctcaagcaccgccaaataagccgttttgatctgttctgcccccagttgcacgcgcagcccgtccgcaatttttgcaaaatcgcacagtgtttccggattgcggctgccgcgtccgaccagcagaatccaggcacccggaggcatgccggtttccaaaatattttccgccagaattccggtgatccggtccccgacgccgagcgggcggccgtacgtaaacacaatatgcggataacgtcgtttcgcttcccggatcgcacgcgggatatcctcataataatgcccggcactcagcagcaataccggcacaacggcgatacgccctgcgccgccccggacaagcgcatcaatccctgctgcaatatccggttccgcaatttccagataacaaatttcctggagatccgcatccacctgtgccatcgcttgccggattgccgctgttgcttcccgggcggtttcgggcacacggctgccgtggctgacatataaaacaccttgtttcatacccattcacccggtacaggccggagcagcgggaagctgttcaaaccatttcaactcatcgcgcagttttaccacttctccgatgatcaaaagcgatgggttgcgcagcccggccgccttttcacttaaatttccaagcgtgccgaccgcggtttcctgtttttccgtcgtgccccagcggataagtgcagccggcatgtccggcgatttgccgtgctttatcagttgcgcacagatgagcggcagatttttcacgcccatataaatgcaaagtgtatcaattcccgcatatttggaccagtatgcatcaaggtcttcgccttttttcgtgacgcccgcgataaaagcaacggatgtactgagcccgcggtgggtgagcggaatgccggcataggtgggcacggcggaaccggccgtaatccccggaacgatttcaaacggaatatgcttttgcaccagtacttccgcctcctccccgcctctgccgaatataaacggatcgccgccttttaaacggacaacagttttgccttggttggcaaacttcacaagcaggtggttgatcgtatcctgcgacatcgtatgagcgtccggctttttcccgcagtagacgagttccgcatccggccttgcttcttttaacagatccggattcaccaggcggtcatataaaatgacatccgcttcccggatcatgcgcaatcctttcactgtgatcagttccggatcgccgggccctgccccgactaaatatacttttctcatttcttcacctgctttaaacttaatcggataactggttggtttggtttatgcgcccacttctcccggagtggctgtagcagcggcttagaagggatggccgtttttgccgcagcaccacctggcagccttattttttctgaaccgtatgcagtccgcattcggttttatgaaagcccgcccatcttcctgctcttgagtcgctgtttccagcagcacgtgtgcacgggaaacagccgatgctcggatatccttggtcatgcaattcgttatacggaagatgatgggacttgatatagttccaaacgtcatcccatgtccaatgaatcagcgggcaaattttaatcgaatggaacctttcatctttattgacaaaattcgttttcgcccttgtcggcgattgctcccgccgcaagccggatatccaggccgacgctccctgcagcgtttcttcaagcggcttgattttccggatatagcagcattggtccggatcccttttccaaagggcagatccgtattgcgccgcctgttcatcaagcgtaagcgacggttttttcatttggatatttaaagccggatatttctttttcactttttcaatcaattcgtaagtttgcggaaagtgcaggtccgtatccaaaaatacgatatccgcatcttctctgactttcgaaatgagatcaatcagcaccattccttctgcgccgaagctgcacgcatataccactgatttaccgtacgtgccatatgcccactgcaaaatttccaatgcgccctttgtttcatcttccggcacgaacactgcaaacggatccgacgtaaactgttcatatgtgagccgcgtttgctccactctattcccttctttcttattcgattactaaggattaaacgacaaaaatcttcttaccctgaagtaagaagatatccattaccgggaaatcttcttatctttcaggccaccacctgcaggaattggcacagtacccgttttcggacctgctgccgaggcttcacagggcccttccctccacctctcttgataagaaaataacaacatataagcttaaagtttattgtataccttcttatgctattcgtcaacgaaaaattctgataaagaaaataaggtccattttcacgaaaagtgttacatgtagttttgggccacctttttctttctcatttgatgaaatggtttccaatctttgcttgcatgtgttttttttcaaatcttactctgtaccaaatcggttcatcaattcacctttaaacttgcggcgtaccggctcagctccgcgtttcatcatcacctggatttttgaagccatttaaaagggcgacaactattcgttcccttttaccatagaggcctttctttatgatcaaacgaataaacataagacatcataagaatcaaacaagcccaaataatgatgattagtgttatgaatgcaatttttggaatgcccaatatcattagtccaaatgagatgaaaaagcaaagcagggaaaaatatccaactttatttcgaaacttcaaacttggatataacttggctttacaatttggacattctatggtttggtcaaacttccataatctcttaaagatataaatccacttaaatggatggttacaatcagaacattttggcaggctcattgacttccaccttccttttcttcgattttaacataaaattcaatcttttttatgccaacaacaatgatttagaaaagagtcttcctttttcagtgcgttttccaacctgcgggggtaaactacatatatccaatgacagagactgaatgaagccaaagcggggtgaaaaaatgattcatttggataagcatcatgacccccggacaaacggcatgctgctgcgccagctttcacgcagggcagtccagccgggtaccctaatccaggaaaatgaagcgctttttcaaaaatactgccagccggaatttcacaaaccgttttccctttcacggctgctgctgaaccggagatatccggttgaaccgtataaaacccttgcagatcagaacggccttgtctacccggaatggaaaacgatattggatcaagaatacagccggctgctgtctgtggcatcccgtacagtcaatgtggcagatttcggggctgccggcgatggaaaaaccgactgcacagcggcattccaaaaagcactgggaaacggccgcgtgaaagtgatcgtaccggaaggcgtttatcttgtaaaggggcttaagctgccttcatggacatgcctttgcggcagcggaaaaggcgtaacagtcatcaaactccatccgcatgcgccgaaaaaaacgcgtcttatccaaaacgcccatttccaccgcggcaatcaccatatatcagtggaagggctcacgctggactggaatgtcgaaaggctcggaaatgaggaaagaacggcagcaggaaataaccgttcaagctgtctgacttttgcgcacgtcacgttcggctgggtgaaaaatgtggaggcggcgggggccggcctgcatggttttgatgtatcgtctgcccggtatcattatttgggcgacggctttctcgccccgggaaggagccgctatatctggctggacgggcttacggcaagcggattcggtgatgacggcattaccacccaccatagcgactattgctttatttcaaattctttctgttacaacccgagtggaaaggcccacaaaaaagggttttccaactccaatggcattgagattgatgacgggtcgcgccatgtctggctttacaataatgcttctagcggctgtttcggaggtgtcgagatcaaagcccaccacaatgcttcggctgcttctcatgtccacctttacggccatctttctgtccgcgacaaccgttctttcaatttccggcatatcggtcaccataaaggtaaggatagcgattcgaaaagcgcggaccatattgtggcggccaatcttgtttccatcgcgccggtgtttacggatttatatgaaggttcaacgccgcgcagcctcgttgtttccgcttaccggaacgttgtcattaacggactgacagcacttggcgacccggattacgatttcaagggaaatcctgttgtcgccatccagtaccgtgcaaaaaatgttatcttgaaaaatgtagaaatcagcgggtttcaaaatgcgaaacggatcaagggcaaagacaaatgcgtactgttgtaatgctcgatcaattcagagagagaatctgcgcggaaatctttcctttgtctgaagaaaaccgaattccggtcgaatctttgcaatcccagtctgaatcctggagagtagctgtagtgcttgtttggtgaagaaatgttctttggcctaccctaaaaattgtgccggcctattttcattcttttgcccattccgtatccaatgcggcaggcttctattttgaaaatatgcgtttgcccattttcgttctctggtgtcgccgcgcccgccgcagcatggatgggtgtcctgaaaatacgtgccggctgttttatccctcttgcggcagaggcgtttttttcggatgatgatttccgaatatttgtcatttttaatcctctataaaaatcatttcccggggaaacttggtgtcttttgtcatgatgatggcgtcgaaaaacatttctatacaaaattttcaccggctttgcttcatcctgcaagtgaaagacgccccaacaggacatttgatcttccgcggagccaatgcgcgggagtttgttgcgatatgtctttcattgcccacgtgtcgaaaattttgttgcaagttgtctctcatcgtgtttgttttatcttctttttaccataaaggacgctttcccgggaaatttgctgcattttgtctttttaccggccactgcccggatgccctttgtcctgaggctggggcattgggacctaggcctgaatctttttttaaagttttcttgaaccgtggttgggatggcctttgtcttgtcgaagaactctaaaagactaacgggcactacccggatcttagtgggcttcccggcattgggaaccaagtttaattcttttttgccgaaatatttcgtcctcttcccgcaatcggtttggaaccaaaaaagcggaacccccatttagggatcccacctatttcggtgtgccgggccaggcacttataaaccgagggaaatatatttgacttccaaaaattcttctataccgtaacggccgccttccctgccgaggccgctctgcttgaaaccgccgaatggagcctgcggcgtggacggaagcccatcgttcagcccgacaatgccatactccagcccctctgcaatttgaatgccttccgaaatattttccgtaaatacatacgcagcaagaccgtaaatggaatcattggcacgccggatcgcttcatcaatatccgtaaatttcgttaccggtgcaagcggcccgaatgtttcttctttcatgcatatcatctcatcggtaacattggaaatgacagttggttcaaagaaaagcccatctttcgtgctgccgcctgtttccacggtagctcccttttccaccgcgtctttgacgtgatgttctactttttcaaccgcattccggtcaatcagcggcccgatatccgtgccttctgcaagtccgtccccaacacggagcgctttcactttttctgtgaatttcttggtaaaagcttcatacacttcttcctgtacatatatgcggttcgagcatacacaagtctggccggcgttgcggaattttgcagcgaccgtgccctcagcagctttatcgagatccgcatgtttcgtgatgataaccggtgcatgcccgccaagttccagcgacacttttttcaccgtgtcagctgaaccgcgcatcagctctttcccgatttcggtcgatccggtaaaagtaagtttgcggacacgctcatcggcaagccacgtgtccccgatttccttcgcactcccggttatcacattcatgacgcctttcggaatgccggcttttgcagcaagctcagcaagcttcaaggcagtaagcggtgtctgctttgccggtttgatgacaacggtgcagccggcagcaagcgcaggtgcaactttgcgggtaatcatggcagccgggaaattccacggggtaattgccgcgacaacgccgaccggctgtttatggacaaacaggcgtttattggtagcggatgccggaatcgtttcgccatacacacgctttccttcttcggcaaaccactcgataaagccatttgcgtaacgcatttccccgagtgcttccttgagcggcttgccctgttcaatggtcatcgtcctggcaagctcgttttcatgttgacggatcagttcaaaccacgtgcggaggtaggcacttcgttcataggcagaaagcgccgcccacgccggaaaagccgcatgcgccgcgtcaacagcgagcttagcttccttttccccgccttttggaatcgtcgcaatcacttcgccggacgcagggttgtccactttgatttttggcagtccttcccccgtccattcaccattcaagtacatcaaatagtcttccatagctccatctcccttcgagtaatagtttacgatttttcagatgatttttcctgtttcatgattgcaaaatttgtttcgcatggcaggtgtgttcgtgatttcagaagtgaactacccaccacttattgaccttgcggtctaattgaagtgggggcttcttgacttatcgttgcttttactagccaacgaaaactgaccgagctatccctcttgttccaagagttttgttacttatgatnnnnnnnnnnnnnnnnnnnnnnnnnnnnnnnnnnnnnnnnnnnnnnnnnnnnnnnnnnnnnnnnnnnnnnnnnnnnnnnnnnnnnnnnnnnnnnnnnnnnttcggaaagccgttaaatttgattcagcgggatagactgtgaaagtgacttatttcttattcaattaggagtccgtgccgcagtgaacgcgacaccagcgggtgaatgaaaatcaagtcggcacatattttcagaatagaaattaacttcccactggctatattgagtgtttttcaattcctcataggtaaaatactaacttcggcggcggcaatttgtgcctccctctttgtctgtttcaattcctcataggtaaaatactaacggtattttccaacgtgtttactgactggaatactgcgtttcaattcctcataggtaaaatactaacttcggtttatatcgtatcaactctagttttacagtcgcgtttcaattcctcataggtaaaatactaacaaaaatatcgcgtccagctagtagactcaaacgaagtttcaattcctcataggtaaaatactaacacggcaaaaacaacgccttactatgtcacagcgaggtttcaattcctcataggtaaaatactaacatactcgaggaaaggcctagcaatttatacgcggtgtttcaattcctcataggtaaaatactaacgtgcaggcggatatgccttactccagcttttttaagtttcaattcctcataggtaaaatactaacttgctttttgattatctccagtttttgcattttcggtttcaattcctcataggtaaaatactaactctgtttgggggtgcgatttagtgcttgtaagcatttgtttcaattcctcataggtaaaatactaacgggcgccttacaaaatagcataaaaggcgtaggggagtttcaattcctcataggtaaaatactaacgctcatccggtcggtgatgtatccaatatagagtgggagtttcaattcctcataggtaaaatactaacgcccagcagcgcacgaaagcgctcggcctgcttcagtttcaattcctcataggtaaaatactaacaattaaacgtcccttgtaacggggcatgggtaaaaatgtttcaattcctcataggtaaaatactaacgcacgccacggaaaaacaggccatggcggaaatgcgtttcaattcctcataggtaaaatactaacatactcgaggaaaggcctagcaatttatacgcggtgtttcaattcctcataggtaaaatactaacacaaatgcagtttgactggtacgtggctaccactcctgtttcaattcctcataggtaaaatactaactttataccgttttacaactaaatgtacagtatctggggtttcaattcctcataggtaaaatactaacggcgaggaggcaaaggatctgatcgcggccggatatgtttcaattcctcataggtaaaatactaacgcaaacggtaatttgcccatactgtggcaaaaaaaggtttcaattcctcataggtaaaatactaacggtgcacatttttgatttggtataaaaagctataggtagtttcaattcctcataggtaaaatactaacttagcacctacccgttttaaaacccagtttacaccctgtttcaattcctcataggtaaaatactaactaataccggacagagctttctgaacgcctgtccatggtttcaattcctcataggtaaaatactaacctaaatgttccttgcaacggtgcatgggtaaaaatgtttcaattcctcataggtaaaatactaactaggcaagtgaagacagaccaatgggttatgccaaagtttcaattcctcataggtaaaatactaaccagaggcgattgagagtttaactttggatcaagcctgtttcaattcctcataggtaaaatactaactccaaaaactcactgatattatcccaaattaagaaagtgcaaaactttactagattgatgcaggtaattggaatcatatggaaaataaatggataatattatcaaaaatggaatcacaactgcctatttttgggttattaaggccacagttgccccctccccacatttgcgggcgtttcaatttccagtattctgtttcagccttcacactcagtcaatcagccgtacactttgaatcatttgccggaatgcctttttatgggcgtatgtttcacaaatatttaaaatgacacttcggctgtgatagaccagcacgccagccgcgtagatgaattccctccggaatcgcctgatcgtataagagcgatacgctggcggacagtgttcttttttaaagatctcgaataaattgtatgccagcagtttaatcagcagatccatttggttggcgtcaaatgaatgcgttgaaatcttgcccatcgagaatccatattttgactctttgatgtagttttccatgcaagccctttgattatagaatctccaaatatcaatgggttcccagtccatgttcgtcacaatcgcttcatacttccataaaaaatcacaagcttgaagctgactttcctcatatttgtcagctttacgaattaccgcaactcttcttggcttcttccaggaacttgcctggtaatcaacggcttttccctctatcacggtcaattcgtcgtcaacatagcggatccacggtgaatcatcgttttcaaccctttttttaagtctcgaagtccacctcagtttgccggtatagccaatcccaccgttttcccagtaactgtagaaatcttctccaccaaatcctttgtcaaaacgggcataacgaatagggtaatggggagaaagcagctgataggtctcttctgcaaaaccgagtaccccttgagaagaatgggaatttccctccctcagcctggcgtttaaacaaagacgggatttcccttcaaatacaagaagagggtgataactttttcttcccggcttgtagggatttactccgacccctgctttttcctggcccccatagacggtttccacggttgaatcaaaatccagaatgagctccttgtcaagccagggttcaatcaaatccatcatgcgttctttgaattcaagatcagcgccctccaacttttccagccttagcaggtctttatttaaaagggtatagtgcgggcatttctcgcccataaatgccaagattaaaggatcatcctgcaaagtccggaaatgagatagccgggaacaattggacagccagccaatcaccaggtatataaagattttgcttaaaggatatttggcattgtattttttcaagcagtcaaaatcccggaaggtctgttcaatcttcattctttccagaaactgcaaaatcgggagcagcccgctaaaattcgtactcttctttaaacgaaacgcatatttgattttcgagacagaagtgatataattcaccttaaaggtgccctcctttctggtttggtagttctatacaaacccaattataccagagattcggggcacctttttattttaagcttctgctttactctcgtaattcaggattataacatttctccatgaccgctggaatttcctgcttgcgcaaaaaaatctcttcaacatctaatggaatccaggcaataccaatagtgtcaaagacttgcccgttttaacaatttgtcgtcgatcccccgggttttctacgctaatggaggtcgacgacatttttgacgagcatcttatttagggcttactgaacgaatcagattttggcttgtatccgatttgccagtaaatgctgtttcaatattatagaagaatccatctgcgaaaatgctagattcgccttcttttacgttaaatcagctatggagcgcttgcgttaaaccctctccgccacttccaccgcgtgccggatcaggctgcggacgacgttgccgaaatgggcgaaacgccggtcttgtgtctggccgcgcttgtaacggtagtagatttgctggcaaatgccggcaagcttaaagtaaccgaaaatcaagtagtaatcgatgttcgagacgtcgcgcccgctttttttcgcataagcttcgacaaactcgcggcgcgtcatgaagccgtccagcgtcgtgacggacggttcgccgagcccatttttgatcaaatccgggtcatctttttccgtccagtagctgagagcagcgccgagatctgcgagcgggtcgccgatggttgccatttcccagtcgaacaggccggtcatttccgaaaaatcttcattaaacatcgcgttattcagcttataatcataatgaatcacggctgcaccttgttgcggcggaatatggtcacgcaaataatggatgagcggctccgcttccggaatttcatccgtcttcgcacgcagatagcgctcaatccagccgttcacctggcgttcgagaaaaccggccggctttgacatggaaaggagctctgtctcttcatacgggatcgcatgcagctccacaagcctgtcaaccatgatactggaaatccgccggcacgtttcctttttcggctccactcccggcggaaaagcggtatcgagcacaatgccatgctttctttccataagaaaaaacggagcgccgatcacaaacgggtcctcttcgaaaagcaacacttccggagccggtgcgaaaaacggccggagcgccttcagcacacggaattcacgccccatgtcatgcgctttcggggcaaccgggccaagcggcgggcgccgaagcaccgcttcccacgaacttgcttttaattgataggtcaaattcgaacggcctgctgaaaattgtgcaacttcaagcggtgcatccggcatttgcggaagcttctcgcgcaaatattgctgcagtctggttaagtccagttcttcccctttgcggaccggaatagtgtctgaattcattttcctctcccccttgtgtcccgtaataggcaggccgttttttcacatcaccggctgcaaatgcttttccaggatgccccttatatcatccggaatcgggcgtgattgctgcttatcaaagtcaaaaaagacgacaactgctttcccctttgcgatcaaacggccggtttctgcatccagcatttcatgggccagttcacagctcgtattgccgagctttgccacgccggtccggatcgtgagttcttcattatagaacgcctggctgataaaatcgcattttactgaagctagaataatattgaaatcttttatttccacgcttgcaccgatgctttcaaaaaatttcaaccgggcgtcttccaggtagatgaagtaactggtgttgttaatatggccgattgcatctgtttcgcaaaagcgtgtccgcaatttcaattcatgcaaacaaatccctccctttcgcttgaacaccattaccgcagctgtatggttttgcaccttgcaaggccctgaccatgaatgatccgctgctgccaccccttcttttcacaaggctatttcctgacgcagccgccgtaacgtatgcacttttcatgcagccctgctgccacccacccggcttgatctacaaacatccccatttcggcagccatatggctctacgctttttcaatcccgtgcaggacgatgtccatgaacagttctgccacttctgccgctgatttccggccttccggtttaaaccactggtagctccagttcaccatgccgagaatggcaaaggaagtaagattcgcgtccagatgccccgcaaactcgccgatctcaatgccttcccggatcagcttttcaaccccgaagcggaaagcttcgcgtttttgtaaaatcagttcgagcttttcaccgcttaaatttttgatctcacggaaaaagataagggcttttgctttttccgttttgatgctttcaagtagcatcaggacaagcgcatgcagttttgccttgcacgatccgttttccgaaaggatggccttctgcttttccaaaagtttcgtaatatagtccatatgaatgtccatcaaaagttgttctttgctggaaaaataatagtaaaacgtgccttttgtcgcgccgatgctgtcaacgatatcctgaatggatgtttccgtgaagcctttttgttcaaacaagcgtatgctgtgttccgtaatcttcgctttcatgtcggtcctctccatctattactatattaagaaaattatatcacatacccggcttcacgttcctgcttttactcgcgcactttcctttcttcatcgcgcagcttgcggcgcaaaattttcccgacatttgttttcggcaacgcatcacggaattctatgatcttcgggcgtttatacggggcgagatgggcgcttgcatattcgatcagtgcttcttccgtcattttctgcccttcttttaacacgacaaatgccttgaccgtctcaccccggtatggatccggcacaccgattaccactgcttcctggacggcgggatgcgcatacagcacctcctcgacatcgcgcggatatacgttatagccgcttgcaatgatcatatcttttttgcggtcaacaatataagcgtacccttcctcatccatcgtcgcgatatcgccggtgtacagccagccgtcccggagtgcttccgccgtttcttccggcatgttccagtaccccttcattacttgcggaccttttacaatcagctcccccgtctcgcccggcttcagttcttccgtgccggttgcaacatcgacgattttataatctgttgatggaatcgcgatcccgatgctgcccggcttgcgtttaccgaaaaccggattgcagtgtgtcaccggggaagcttccgaaaggccgtacccctcgacaatgacgctccccgttttttcttcaaactaacgcaaaagcccgagcggcatcggtgcactcccgctgttgcaggtcttaatggaatccagcccgtactccatcgctttcgggtggttcgtgatggcgacatacatcgtcggcacacccggaaaataggtcggctgcgtttccttgatggtcttgagtacttcttcaagatcaaaacgcggcaccatgaccgattccgaaccggtgtagatcgcataattcatggcgcatgtcatgccaaatacgtgaaaaagcgggataacggtcaaaatccgttcttttcccggccccatgaccggtttgaaaaattcatatgtttgcaccagattggcaagaaggttccggtgggtcagcatcgccccttttgaccggccggtggtaccgcccgtgtactggagcacggcaatatcctcccgggggtcgagcgcaggagggttgtaatccgttcctgcctgtaacaaggcatcaaagggttcggcctcatccaaggggccggccgccggtttaaaaccggctatgactacatttttcagcgatgtttccgggcggacggcctgcactttcgggtacaaatcatccaggacaatgatcgtttcggcgcccgagtcatttaatatatgcctgatttccggttcaacgagcatcggattgatctggacaaccaccgcacctgccataagcgcaccgtaatagcacacgacatactgcgggcagttcggcagcatgaccgccaccctgctgcctttttgcacgcctctttactgaagggaggaggcaaaggcaagcgatgctttgtaaagttccgcataggccgtctttctgccgtaaaaagagagggcagtccggtccgggtacttttcggctgcagttgcaagtatttgatacagcggaatatccagcacttcaatttctttgggaatctcatcggtatagacagcatgccacactttgttttccattccaaatcccccttgtttttattgccaaatggactgcttaaccatcatccacccgcccggcttgccggttttaaagcacgtgcatgccgccatcaacgagcagcacatcccccgtcacgtagtccgaggctgccgatgccaaaaaaacagctgcaccttttaaatcctggtcattgccgaaccggccgagcggcgttgcttccaatattgggtttttgccgcgttcgatgatcactttggccatttttgtcgggaaaaagcccggcgcaatcgcgttcacatggatgccgtatctgccccatttggcagcgagatcttttgtaaacgtgatgaccgcccctttgcttgtgttgtaaccgatcgtatccatgatgcgcggatcgacgccgccaagcccggcaatggaagcaatattgataatcttgccgtgcccctgcttgatcatggcttttccggctgcctggctcatatggaaagtgccggtcacattcgtgctgatcactttttcccacgcctcaaccggcatatcctcggcaggcgccccccaggtcgcgccggaattattgacgaggatgtcgattttgccaaactgttttacggtttccgcaaccacttcatcaacccgggcgcggtttgtaatgtcacactccaatgcgagcgctttcacgccgagcgattcgatgcgtgcagccgcttcttcgcatgccgctttttttctggagcagagcacgacatccgcccccgcttctgcaaaagcccgcgcaatttgttcaccgagccccctgccgccgcctgtcacgatggcggtttttccttttaaactaaacagttctaacacgttcatcggctaatcccctttcctggtacggtttcatctcaagccttgcaatctggtcgagatggacttcatctgggccgtctgcaagccgcaatgtgcgcgcattggcccacagccgggcgagcggaaaatcgtccgaaacgccggctgcaccgaacgcttggatggcgcggtcgatcacattgagcgccatccgcggggccactgctttaatcatcgcaatttcctttctcgccactttattgccaaccgtgtccatcataaacgctgctttcaatgtcagaagccgcgcctgctcgatttcaatgcgcgactcagccacccactggcggatgacgccctgttctgcgagcggctttccaaacggcacacggttttgtatgcgcttgcataaaagttcaagcgcacgctccgcagccccaatcagccgcatacagtgatggattctgcccggcccgagccgcccttgcgcaatcgcaaacccttttccttccccccaaatcatattttcagccggcacccgcacgttttcgtacgtaatttccgcatggccgtgcggggcatcatcataaccgaaaaccgggagcatccgctcaatcttcacaccgggtgtatcgagcggtacgagaatcatagactgctgttcgtgccgcggtgcatccggattggtttttcccatgacaatcgcaattttgcacctcggatcgccggcgcctgatgaccaccatttccgcccgttcacaatgtattcatcgccgtcgcgtacaatgctgcatgaaatattggttgcatcactcgaagcagtatccggctccgtcatggaaaaacacgagcggatatcgccatttaaaagcggtttcagccatttttccttctgctcatcactcccgtaccgggcaagcacttccatattcccggtatcgggcgcgttgcagttgaatacttcgggggcaataatggaccttcccatgatttcgcaaagcggcgcatactcaaggtttgaaagccctgccccgtattccctgtccggcaaaaacaaattccaaagcccttcctgctttgcttttgccttcaattcttccataatcggcggaacggcagcccaccgtgtttcctgtgtattcagttgttcctcaaagagcttttcacccggatatacgttttcttccataaaacgctcaagctttgaaatcagtgccttcacttttggtgagtaatcaaaatccatatgatccatcccctccccgttgactaaccggttagtatgttaatttaagtataaacaatcatttgaaaatttcaagaaaaaaaataagccgaatttcgccagtatatgtagaaataacgggagttgccctttttccggtatgaaagagggttgctgaataacaaaaaggacgctgatcactcgccgaactttataaaacgtgcaaagaaacagaagccaaatgtaaaccaaaattgttcaacaagcccgaaaatacaaaaagtggggaaccatttccccgctttttgaaacagatgattggcggtccttgccaatcagagtattttcctccccaattgtccgagcgcatagtggatgctgtgctgcaacgtctggaagcagtcaaactggctgaaatcaagcccggaagaagaaattgtcatgctcatggacggcgatataccgacaaggatcgtctgcgtgccaattaaggaagatgcctttccgatattttcaataaactggatgctgtgcggatcgtcttccacatcgagcgccgttaaatcaagcaccaaatactttgctttgtactgcggcaaatttttcaacgttttttctatcagttcttcggcacgttcatcgtcatatttcccgattaacggcacgacgacaatgccgtccaaaatcggaataatcggtgatgacagctgcttgacgagctccttcagttcccgcgtcttatcttcgacgagcgcctccagctgaatgatctgctcggcttcctttttccgcgccagctggtgaatattatgtgacaccgtgatatccgatgggaaatactcaatgatcgtggagtcatggccttcgatctgataccggacgactttataccatatatttgtatggagcaacccggtaaaaacaccagcatagtgggcaggcagaaaattgctgcccgttttcttcccctgggccgcattgattttatgctcccagctgtctttcagctcaatcgtcaatgtcttctgatcaaagtccatgtctttaatcacggctcgtccccagcccgctgatgcgtaagtagtggtaatgcgttcagacgcctttttcacatcgaaatctttaattttattaaaataatcggcaacgagcaatccttggcggaaacccgctgtctcaaagacaacattggatgcttcttccccggatatttcttcaattgtagtaaacagattgcgcatcgcagtcggaatccagaaaaggactgcatcttccccttcaaaaatgaatctgcctttatccaattcccattcaaattgaagaccgcccacatgtatattcggatgttcgctcacagaatatcccctctattatgtacaatgaattgtattattattataccggttcagttttcttgcgtctattgatacgggttctgtatgtgacaaaattcacgtgtttgccggaaaatgtgctcagccttgctttcaaagaaattggcttatacgaaaaaggcgggattgccccgccgtccatcttaatcgccaaaattgacattatggtaaacttgctggacatcttccaaatcttccagcacatcaatcagtttttcgaatttctcccggtcctcatccggcaatgtgacttcgttttgcggcaacattgtcaattcagcaacggtaaattccgtaatgccggcattttcaaaagcttcctgaaccgcgtgaaactggtccggctccgcatagacaatgacggcgccgtcttcttcaaagacatcgcggacgtcaatatcagcctcaagcaaaagctccagcacttcatctgctgtttttccttcaatgccaaaaactgccgttttatcaaacatatacgctactgaaccgctcacccccatattgccgccgtttttcccgaaagcggcgcgcacttcggatgcggtccggttgacattgttcgtcaacgtatcgacaatgatcatcgagccgcccgggccgaagccttcgtaacgcagctcgtcatagttttcatcggcgccgccttttgctttttcaatcgcgcggtcaatgatcgctttcggcacgctgtatgttttggcgcgctcgagcaccatttttaatgcgctgtttgccaccggatccggcacaccctgtttcgcagcaacatagatttcgcggccgaatttcgcataaatgcggcttgtattagcatcccttgctgcttttttatctttaatattattccatttgcgtcccaaggggatcactcactttcaacaaagattcgaatgcttccgtactcgcccattgttgaattatacaccaaaagccttccggtggggtaaaattttttggtttttgtttcttacttccttttcgtccgtatcccggaacccgttgccacaaccaggccgccgagcacatctgcaattaaatcggtcatggtatccttgttcccgccgccctgcaaagtggtgccaaagaattgatcgcccgagaattcatagatctcccacagcacaccgccaagcgcggcaaacccaagcacaaacaaaaatacaaaccaggcggagacccccttgcccgcatcccggcgcaccagccgttcataaagtgcgatagcagcaaatccgagaaggacgccgctcacaaaatgcaaaaaggtgtcccaccaacctaagccgtaccagccgcggatcgatccgaaatattgggagccggttaaaaagagaaaataagaaataacaaggggcaggtggaaccggaggcgcggaatccacgaaaggataagcggaattgcgccggagatcaccccgccaagcgcgaccgcagccttccaagacgagccggccgtatattgcatggcgcacaaaacagccatccacagtacataaaccaagctgattccaaacacaattttccggtccatattcacacttcccttcttcttatacattttgtttcctgaatccagtatatatcgcgatcagcatcccgccaaaaaatccggccaataagtccatcattgtatcggtattgccgccgcgctgcatcgtatgggaggcaatcatatccccgataaattcatacatttcccaaagaacgcttcctgttatcgcaagcccgaggggaaacaatgcgggaatcaagcgcgacatgccccgccttgccgcctccggaaccagtattttatacagcgtaacaccgatacaagctgtaaaaatgcccttataaaagtgaacggacgtatcccaccatgcaaaacgcccgtaaaatccggcgagtgaaccgaggcagatggagcaaatcacgaaaatataccatccaataatcgagggcgtattgatccggttatgttttaaaaataataggccgagcggcagcgcacttaacacaatcccgccggccgcaatcccccagcgcaacgtatcatgcttaaaaataaaatagaccataagcccggccaacagcaatatcatggcggaactgagcagtataataatgatgcgtttcacctttccaccccgttctgtttcttttccaaaaataggataccctttctttttccatttcatcctgaaatcaataaagacgtgcagaaattcgtccatcaaaacatgggggcaggggaaaggggggcaggggataaaaacatcaacccgttttccttcagcggcgttgccggcgaagaatcaataaacggcaaaaagtttttgggtgccattggtttaacaaaagatgaatctgccgtgaccccttcgctgcctgtttttgaagacctgaaaaaacacaaaaaagagatacaatcttacgcaacccttttagtcgtgcagtgcaatttaaaaaatagatggcgggccatatatccgcctttccagtccagttaccgccatgtgcggacagaaaaggtgggcacgggttttaagcgcatgcacattttgcttttcagtgcatacaaaaaagacgttgaagcacaacccaacgtccttatgatttgtttggcctttttcagcgtgcctgtgtttctttttcgcggccgttttcatctgcaaaatcttcgtggtgcgtggaatacatggccatcggttctgcatccgggcacatatagcggacggcgctgtttaaagcaaccgggccttccgcaaaccccccggcaatcaattttaatttgtgcgggtaagttgccgcatcccctgccgcgaagatcccgggtatattcgtttccatcgcgccattgacctcgatccgctcgtctttcattttaaggccccagtttaaaatgccgccataatcgccctgaatgccgtggttcacgacaacttcatcggcttcaagccatatttcttcgcccgtcccggcgtgtttcaccgcaacgcgttcgatcctgttgccagtcccgtgcagggctgaaatgcagtaagggataaaaaggcgtgcatttttcaccatttcggacacatcgtattcatgcccgctgaatgcttcccgcctgtggacgatcgtaatgctttcggcgatcccggccagttcgtttgcccagtcaactgccgcatttccgccgccggaaatcagcacccgcttgttgcggaagcgatttaagtcgtcgacggcataatggagattgccggattcatagcgttctgcccccggaatatcaagcttaatcggtttaaaaatgcccgccccgacggtgagaataaccgtttttgtcaggtgaaggccgccgttttccgtgcttaacatcaagatgccgtccgggcgccgctttaaaccggatacatgctgatgaaaaaggatcgttggcgaaaaagtttccgcctgccggatcagttccttcacaagatccccgcctgttattttccggatcccgccaatatcccgcaatgttttttccggataaaacatcgagatttttccgcccagctggccgctagactccagcactttcgtctttaatttccgcatgccgctgtaaaacgccgtaaacaagccaatcggcccgccgccaataatggttacatcgtagatttcatggtccaatgccaagatcctccaatcccgctcataaaaaaagtggctacgccatttgtgcgcgtacttctttatacggtttaatcaaatcataggaaaggcaaaccggttttttgcacctcggatcaagcgcaatttgggcatccaatccgaaacattcccgcatcatttccgctgtcaccacagcttcggggcttccctcgtaaaggatttcgccatctttcatggcaacgatatggtccgcaaaacgggcggcctggtttaaatcgtgcagcaccatcacgatcgtgcggtgctccattctgttcagctcctgcaagagttccagcacttccagctgatgggacaggtccagataggttgtcggctcatccagtaaaatcatttcggtatcctgcgcaagtgcgagcgcaacccagacccgctgccgttgcccgcccgaaagcgcatccacaggacggtctttcaattcttccgtcccggtcatttcaagggcccggtgaatggctttccaatcttcacgattcagctttccaagccttttttggtgcgggtacctgccataagatacaagttccgaaaccgtcagtccttccggcacactcggagactggggcaaaatcgcaagcttttgcgcaattttctttgttgattgtcttgccagttcttttccatccaaataaacggacccgtttttcggaaagagaatgcgcgccaatgccttcagcaaagtggatttgccgcatccgttcgggccgatgatcgccgtcatttttccggctggtatatttaaatttaagtttttaataatttcatgatctccataggcaacttttaaattttctgcacaaagctttggcatctcagttcctcctatgaatctggtattaaatgaaaatgattcttaatatcaatttcattctataaggttttcaaataggtgtcaaatcgatttttcaccggcaatctccaggtttttccgcaatttaagcatttcctgctacccttcctgtgcttttgaaattttgcaaatcttttctggaagaaaggctctccttttttgggcctttccagttggaataagggtgttcttcccccgtatccgcatgatgccgggtttggaaacatcaatatgttctttccgcagccaaagccgtccatgcaacatggacggcaggccgtgaaaataattatttgatcgtttttaacacatcctggatcatctctttgtttgcaatcgcgccggagtaaagccagccggtatcagcggaaaactcagccacatggtgtttcttgacggcaggaatgcttttccataatgcattgtccagctctgttgcgcgggttttatcgctgttaatcaggaaaatatagtctgcatccagctcggttaatttttcaagcgagatggcattccagttactggttgcttttgcagagatttcatttacaacagccggcaccttcaagcccaaatcattgtacaggacgtccccgcttgatacatttttcgatacgataaaaaatttattgttcacaagccagattgcagcggcagaaggagattttccgtttttcgccagttgttcttttgctttcttggctgtcttttcataatctgcgagcacttgttttgcctttgcttctttgttcaacactttcccgacagtaagcagttcttttctccagtcactgttttgctttttgctcacgacaaaggttggagcgattttgctgtattgttcatacttcccgccttccaccatgccggcatcatcaatcaggattaaatccggcttgaatttttgcacttgttcatagggcaggtcgtaagaaatcgccggcacccctttcagtaaatcgtcctgcaaatattcctgaatgccgttgctgacactccattgtgcgacaggcttcaccccgagcgcaacaagatggtcttccaaataagtcgcaatgacgcgtttcggatgggccggcacttttacttgatgccccactgcgtctgttaccgtccgggttttcgccccgccggcaggcttgtttccgttcccatttccggcctggccgttcccgcaggcagcaagggcaacggacagaaagacaatcccgcatatttggaaaatcttttttaattttagattgtaagacattttcatccccctggcattatgataaaatattgtagacagataaatgataatgattatcaacatcaattaaagcgaaaatttttcattctgtcaatcttttttctttttgaacaaaaaattttttaaccgtatcgaaagagaaggaaggaagtctgggatggcaaaaccgcacacaagtaaagcggcacaccgcgggcaggatcaaccgtataaaaaacgactggcttattttatcctcggcttcgggtggatttttatcattcttgccgtcgcaggttccattcaattgggtgcatcgaatatcaactatacaacggtatggaaaagtttgtttttttatgatgcaaacaacccggcccatgtcattatccatgaattgcggctgccgcgtaccattgccgctctgtgcgtcggtgccgggctggctgtttccggttcggtcatgcagggaatgacgcgaaatccgctcgcatccccgtctattttgggggtaacctcgggatccctttttctcatggcggttgcctatgctttttttccgggcatttcttaccggagcctggttttcgtatcttttgccggagccggtttgggggcggcactcgttttttcaatcacagctttatccaggggcgggaacaccactgtgaagctggcgcttgccggatcggctgttgcttctctgcttagcgccttatctacggcgatcgggcttcgtttcaacatatcaaaagatttgagctactggtatgcaggcggcgtgagcggtgtgcaatccagccagctcaagtatgtcattccggccatcattgctggcattatcatcgccgttgccatctcgcgcgccgtcaccattttaagcctcggggaggaaatcgcaaaagggctcggccagaacacggtatttgtttatatagcaggcattgtggcagttcttttgctgacaggggcggccgtatccattgccgggatgatcgggtttgtcggattggtcatcccgcacattacccgcttccttgtcgggtcggattacagcttgatcatcccttgttcggcgattctcggcgcccttttgttgatcattgccgatgatgccgcaaaaatgatcaacgccccttttgaaacaccggtaggcgcagtgaccgcaatcatcggcgtcccgttctttctctatttggcacgaaaagaagggggcggattatagtgggaaacctttcaaccggcaaacggaaattcagcatgctttgcgccgtcctgcttgttttgctggccgtcctcttttttgccagcatccggacaggcacaatgaacattccgttcccgcaaatatggtctgcctttttcggcagtgatgttggcaaccagcggatgaccctgtttgaattccgtctgccccggatcgtgctcgcgatgctaattggcgccggaattgccgtatcaggcggcattctccagagcatttccagaaacccgcttgcagatcccggcataatcggcgtgaatgcaggggcaagcttttccgtagtattatatacattcttttttaaaggcacggcctttcttgccggcgtagtttctgtttttgtcatgccgttttttgcattaaccggcgcttttctttcggcgatcctcgtctatttgtttgccaaaaaaggcggaagcgtggcgcccgctcgtcttgtcctgacaggtattggtttaaatgcggcttttaatgcggcaacaacagtcctgcaaatgaaaatggacccccaggatttcacaaaaacgctgacctggatatctggaagcatttgggcgacaaactgggattatgtccttgtcactttggcctggatggttgttctgcttccatttgcgatatacaaagcccgttacttgaatattatgcgcctggatgagccggtaatcacagggctcggggtgccgcttgaaaaagaaaggctgaaacttctcgggaccgcggtcgggctggccggatgctgtgtagcggtcgggggcggcattacgtttctcggcctgatcgcgccccacattgcccgcgggatcatggggacaaagcatgaattttctctgcctttaacggcgctgattggcgcaaacattttgctgctggccgatacagtcgggagagtcgtgatgccttctttggaactgccggtcgggattgtcatttcaatcctcggcgcaccgtattttatttttctgttgatgcggacagcataatcgtgaggcaacatggaagcccccttattccatccattggcaaaatttgcacatgcccggggtggaaagatatttacaatttttaaatttttcgctacgataacaacagtgataaaaaaggaaggctgatttaatgatattcgggcttgatccatccatgttggcactgttggtcggttttgggttttgtgcagcttttattgattctgttgtcggcgggggcggcctgattgccctgcctgccctgttgtttaccgggctttcgccgtctgcagcggttgccaccaacaaacttgcgggaacaatgggatcatttacaagcacatttgtattttatcgttccggaaaactggatctatcttccatttataaaatgtttccgctcacgtttttcggttcgatgctcggcgcgtacaccgtccatctgattgatccggatgtattaaaaccattgatgctgatcatgcttgccgcagtcggcatctatacggtgacgaagaaagactggggaaaaatcatggcgtataaaaagttatccgccagccggctgattttgtttacagcgctcatttttctgatcggtttttacgacggatttctcggcccgggcaccggttcctttttaatgtttgcctacctcatgatcgggtttgactttttaaaagcagccgggaacgcgaagtttttaaattttggcagcaatatttcggccctccttatgtttatctttttagggcaggtccattatgcctatgggattccgatgggcctcgggcaaatcgccggttccatcatcggctcgcggtttgcgattaaaaaggggagcagctatgtgcgcgccctgttcattgccgtcacatttttgctgctggcgaaaaatacatatgattatgtacatgcgtttcttttcggctgacaaagatgaaggatcacgtttttgccatggtacagagggatcaaaacccgggggatgctttttgcgcagctcgccgggattttttatgggaggtgtttgaaatgaacaaatcctggctcattgtgctcgttggggcttttttcgaagtcttttgggtcatcgggttgaaacatgcagataacttgctggaatggatgggtacgctgattgccattaccgccagcttttacgcactcattgcggcaagcaagaatttgccggtcggaacggtgtatgccgtttttgtcgggcttggcacagccggaacggttttctccggaatcgtatttttcggcgaaccgtttagtttgataaaaatcattttgattctcattctgctggcgggcattgttggcttgaggatggtggaaaatgaaaaaagcagcggggaggcggattcttgatggcttgggcttctttactcattgcagggttatgcgaaatgctcggcgtagccgccatgaatatggtaaaccgccgccgcaatctgcagtctatgctgctcatggtgcttgctttcggcgggagttttttgtttatgtcatttgcgatgcggacgctgccgatgggcacggcctacgccgtctggacaggcatcggcgcagcagggggcgcaattgtcggtatgttatttttcggggaatcgagagactggcggagaattgtttttattacgatgattttaggcgcagcggtcggcttgaagctggcatcatgaccgccgcgcggtgtcatgtatgggtatctttcctgggccgatgccgcgccaggctttacttttgttttactgtctccctgaatttttccggcatcatgaccatgatgacttcccctattacgaccactttatcttccgcaaatacttctgtatcgatccggtactttttcggatgaatttcggtaacggttccgattgccttaagcggcacaccgagcggggttgggtgcttatattccacttttaatgtgccggttacaaaccgcggcggctctgttccgtcgccaagttcgttgccgtttttccggagcacatacagggaggcggagcccgcgctatggcagtcaatcagcgatgctacgatcccgccgtaggcaaaccccgggattccccccatatattcaggaagcggcgtataaatcgtgatggttttgtccccctgccagcctgtgcggaaatgatggcctttttcattcagccgcccgcagccgtaacaagtagcaaatgaatcgggatagtaatcctgaactgcctttgtaactctttcctccattttctcacccctttttattctatttaaaattataatacattttgcacaaaattttaacggctgtatttttagaaagttttgcgttataaaaagcaccggcaaccagatgtccggtgaaaattttttttcttataaatttttcagctgctgttttgttttttccacttctgtccggctcaagccggttttttccacaatgaattgaagatccataccctcctgcaacattttgatggctgatggaatcgtttgtaacaattcttttctttcttcttttcttccttcttctcttccttcctcttttcccttcctatacccgcggtcaaagtaggaattcggcagcttcaatacttgctctgcttcgtccgggtccagcattttaatgttttccattacttccgcctcctctttttcattcagttttaaataaaaatcaaagaaaccatataacagcctcatttttgcagggtcgagctccatccgggccagcacccagtcttttcttatttttcagttttattttaaaggacaaacgctcgtggcagccacaccaatttttttgccaaatgccatccgcttgttcccccgggacgggaggggcagatgcaaaaccatcatctctgcagtccggcaatgctaactttttccttccgggacaccctgatgtaaaatagaagtacaaaattgatcttaactgttttgccatacaacttaaccaaaatggagttcaaatctatacagcagaacaggaagtggtgaaaatgcctgccattttatacgggtttatgttatgcggcctgctggcgggattcgtccttttccgcaagcgccctttaccgcatgcaaccggcacagccgggcgggaaaagatatccgttattattccggcaagaaatgaagaaaacaccctgcctgccctgttgcattctttaaacaggcaaacaaccaaacccgttgaaatcattgtggtggatgaccactccgaggacaggacaaaagaaacagcagaaaaattcggcgtcaccgtcgtttctgcgcctgatcttccggatggctggaccggaaaaacgtgggccgtctggaacggttacgtgaaatccacaggggatctgcttatctttctcgatgccgacacccgccttgctaaacatgccatcagctccctcgtcacagcacacaaacagcaggggggcgccatctctgtcattccataccaccatactgaaaaattttatgagaaactggcaatggttctgaacctgctcgggattttctcattcacctcgccgtttgaacgcttcaaccggcaaaaagggctttacggtgcctgtatttgtgtatcaaaagaagattatgacaaaattggcgggcatgggaatatccgcgctgaaatgctggacgatctgaacttaggcgcccgttttcaacaggccggcattccggtcaccaattttaccggaagcgggctcttcttcttccgcatgtatcccggcggtttcaggcaggagttgcaaggatttgcaaaaggggcggtgttaagcacatcagccatccatccttttacaattgcggctgtcgttttctggattcttggcctgctcatatccgagctcggctgcttttccggcatcccttactttgtggcaggctatttgctgtatgccgcccaaatctattattttaaccggcatgcgggaaactttggcatcctgcaacctttgtttcactttttatccatgatttttttcctgaccatcatcctgtattccctttatcagtcccattttcgtaaaaaagtgctttggaaaggcagatacattgatgtgggaagggggcaaaacaaatgacttttttattgtcagcactttgttttctttcgggttcgctgatgttttcttactggatcggcctgttattgaacatcaatattcgcgaaactgaagatggaaatcccggtgcagctaacctttggaaaaaagccggttacaaatacgggttgcttggcattgcgggtgacttcggcaaagggtttcttccggtttggctgatcataaaatccggggcggccccatcgcataaggcattgattcccattgccctggcgccgattgccgggcatgccttttccccttttttaaaaggaaacggcggaaaaggccttgccgtaagcttcggcgtatggagcgcattgaccaaatttcgcatatccctcacttatgcagttattcttgcatgcttttatgtcctggcgaaggtggtgaaaaaaggcaaaaaaacaaccagcagtgaagacagcctgcaaacggcaaccggattcctgctgctgtccctctttcttatttttcgaagattcccttcttttctcttatggatctggctgggcaactttgtcatcctgctgtggaaaaataaaaaagcgctcatgcgtttgaaaaaggaaagggatttcaccatgtaatggcatacaaaaaagcgggaatcactcccgcttttttgccagggccatcaggtctgtttttgccgttttctttccaaaattggttttcaccgtgctgcaaatgatgttctatcccgaaaatatacgccggctctggtgccgcgttcactgcagcatgggcgtctaaaggcagattacagctcgtcaaatccgttcaaatcgctcactttcgtataagaacgggacttttgttcaaagaaatccgttttcgttgcgtcgaaattatctgcataggcgcggatccatttcatcggattttcaacatgttccgggtacagctcgcttaatccgatcatgcgcagcattttattggcacggtatttgataaaaccggccatttcctcaagatcgatcccttccacgccccggagcacgtattccgaccactcggtttccaagtcaacggactcgcggaaccgggcatatacccaatcggaaaaggccggcgtgttcaattccggatgttcggaaagcaccgcgcggatcagttccgaaataaagcgcccgtgctccagctcatcgcggttaatataactgatcatcgtcgatgtgccgaccattttgttctgccgcgccagattataaaagaaagcaaaaccggaataaaagaacaacccttccagcaatgtcgaatacacgagcgtttttacaatgtcttccacatccggctgccgggcaaacgcattgtattgctccatcagcttttcattccgctttagtagtaccggatctttccgcccgatttcaaatgcttcattttgtttatcaagggacacgacggacgataaaatataagaataactctcattgtggacagcttcctgctgggcaatcaccgccaaaatcgattggacggacggatcagtcgcatacagcgaagcaagcaaaatcgtcctcgtttgtgacgaatcgagcgttgccagcaggctgatgattttcaaaaacgtttcctgctctttttccgataacagcgggaattgtttcacatctgtcgacatattcacttcatccgactgccagtaattccccaacaaccgtttatacgttttgtaccagtgcggataagcaagatcattccagtttaaaatcccgcttgacttccctccgaataaggcagtcgctttattcgggtgaaccggatccaacgttttcgctttttccagcaaagcgtttgacatcttccagcactccttctatccatttttccacttctttttcctggcttcccctcggagactgttcaattttcaacggttcccacggactgttgtaaaattttgcaagtttgcgggcggctaggcagaataaatcatcaccgccaaactgcgtatcccccgttccgaacacagcgacattgggaggtttccagccaatttccagcacaaaatccttcacttcttcaggcgtggctccccgttcccatgtgaatgtcccgaccaggatcaaatcatagtcgtgcggcgaaaacggcggggaaatgccaatggcgtgcatgtccaccgcaatcccgcgcgccctgcaccagaatgccagcagctccgccgtttcttttgtattgccgctgtaggacaagtatgcaatcagcactttcaactttggcaccactcgcattcttccacttcactggaggtcgagcgcacataataggtcgttttcaagccggacttccaagcctgcaaatggagatcaagcaatacttgcgcgcggatattatacggcacatagaaattgaaagagatgctctggtcaatatgtttttgccttgccgcattctgccggacggaccatctttggtcaagtttataagccgaacggcggtaaatattgtacgtccgatggtttaaatcaggcgctgtcaccggaaatttgtaatcctttttttcttccatataataaggctggaaaaccgggtcgatgcttgctgtcgagccggcaataatcgaagtggtcgcattcggcgcaaccgccattaaatacccgttccgcaagccgtattgtttcacttcttcagcaagcgctaaccagcgttcgctcgtgtagcctttgccggtaaaataagcgccggtgctccacttgctgcctggaaatgccggatagctgcccttttccctggctaattccatgctgcttttaatcgcatagtaggcaatgttttcatacagtttatccgcatattcgacggctgcttccgtttcccattcaattccttcaagtgccagcaaatgatgccagccaaacgtgccaagcccgaccgcacggtacttcttattcgtaatttgcacttgtttaataggtaacgtattgacatctatcacatggtcgagcatgcggacctgaatgcggataagccgttcgagcaccccgtccgggacggctttcccaagattgatggaactcaagttgcaaacgacataatccccggaacggtatttctttacgatcatattttcttcttcgatccattcttcaatcagctcagtcggggactggttctgggcaatttctgtgcataaattggaacagtaaatgatccctttgtggctgttcgggttttgccggttcacttcatcgcggtaaaacataaacggcgctcctgtttcaagctgcgatctcatgatgcgcttcataatctcgattgccggtactttcctttttgagcggagaccggcatgaatgcacgcctcatatttttcacgccagctcccttttcccttctcttcatcgtaaaaatcttcaagggcaaaccccatgacttcttttacttcatgcggatcaaacaaataccagtccccgcggttttccacctgttccataaaataatccgggatgcacacgcccgtataaatatcgcgcgcacggagccggtcatcgccgttatttaacttcaaatcgagaaaatcttcgatgtcgcggtgccaaacatcgaggtagacggtaatggcgccttttcttgtcccgagctggtccacgctcactgccgtattgttcagttgtttgatccacggcaccacgccgctcgacatgcccgggaaacctttaatcgcgcttccccgcccacggatttttcccatatacacgccgatcccgccgccgtttttcgaaagctgggcgatgtcggtattgctgtcatagattgattgcaggctgtcacttactgtatcaatgaaacagctcgacagctggccgtgcgttttgcccgcattcgcaagcgtcggggttgcgaccgtcatgtacagattgctgagcgcccagtacgcttccttcacatgctccatgcgggtttcctgctgctcatcctgcatcaggtacatcgcaatcaccatccagcgctcctgcggcagttcatagacatgcttgtcaaaatcgcttgccagataacgggttacgagcgtatagaggccgggatacgtaaaaagcaaatccttctccgggtcgattatgcggccgagcgtttcgatttcctgctttgtatatttgtcaagcagttttggagaataaatgcccttttctgccagctgcctgagcaaatcatagaaaggcccgtacttgagggctggatcataatgccggtttttggcggcttcggcataaagcttatgtaagtaaattcttgctgcaaagaatgtccatgccgcacctgcttcatcgatattttcaagggcatgtttaataagcagatctgttttttccgccaaagtggcgtccgggtcccataattttaaaatcttttccttataagcgccggtctcaatgtccaggcctgcggacatttgatcaatgagctgcaaaatcatttcttttgattccagttgaatagatatcacgttttcccctcccttttttgaacgcaaaaaagccgttcatttcagggggatgaacggcaaaaacggcagaaaaacagcatccgtgatcatctgttccgccgtttcccgttcccgcaccccgaagaatagaaacttcaagtattggcaggtctcctggcttgtgtttcattctaatgaagcccttcccataccgccgccaaaaaaaagcagccggtacagtggttcgctctttcgtccacactgacagttgcgggggcagctccggtttcccaccggattcccttttcaggcatttcaaagccaccaatactcgcatactatatttagtatttttttgtttaagaatttctatatgttgttatcctaccatattcgacaaaagatatcaatcctcagtttcgttgaatatgtgccaagtttgtccgtaaaaagatgccggatacgggccagccttcttcgccttttttctgagccatagaatagatggccccccgatattttcacagtccgttatccattttagacgattaaggtggcaggtacaatacatcggtttgaatttatcagctatcccggcaaactttgaatatcccccataaatggcagtggctataggggcttgcactaacaactcagcagccaataaaaccagcaaacatccaaaaaaagtacacatggacgggactttttcaatatggataactctgaagaaactgttggagacgctgattatgtatttttagcacgtgttgatgagaaaaccgggactgagtacaaaaatacaacacaaattgaaacagaagatggtacaaaagaaatctccacaccctataccaattacaaagtgacagtattagaaaatatgaaaggagaattggagactaacacatctattcccgttcaaaaagccggcggaatctcagaagacggaagttctattgtaacatttgatgaagataatctgcctgcagccggccaatcttatgtattcttagcaatgcacaagaagatggttctttacttgtttcaggcccgaattcaaacataaaggttatacgtcctgaatggcgaagaaaactatatcctgaaagacattgcaaaaaatgccggtgtggttcaatcacagttattaccaggatttcaagttgcagcagataagcttttttcataaaaaggttggggccagcaaccggcctcaaccttttcacctttaattcgtctttactgcttgaacttgatagcctgttttttcaacgatttctttcaactcatctgttgaaacctttgcctcgtcgaaatctacttttgccttgctggcgttgaaaagtactttcacattttccacgccttccactttgtccagcgcgccttctatttttttcatacaagacggacaggttaacgtttctaattgcatcacggcttttttcattccgtttccctccttttgtttttattttacatgccgcaccggtttccgtaattgatctccatcaagttcgcccattttgctgatcttgaacttctgccgtccgccttttggtgcaaacccgatcaaccgcatcgcattgagaataacagctaaaacgctgccttcatggacaaacatgccggctgcaaggtctacctgcccccggagaaccccaacaagcaaaaatacgacgaccgccaatgccactgctatattctgtttcatattccgcattgtttttttcgaaagggcaaaggcatgggcatattgggaaagcttgtctgccatcaaaacgatatcagccgtttcgatagagatatccgttccgcctttccccatggcaagcccgatatctgcagttgcaatcgcaggggcatcattcatgccgtctcctgccatcgccacaaccgctcctccctctttcagtttcttcacatactccactttttcatccggaagcagctctgcataaaaggcatcaatgcccaattggctggcgacggcccgggcggtatggcggttatcgcccgttaacatgacgatccttttgatcccggcagcacgcatatcctccaaggcagcccgggcatcttcacggatttggtcggcgatggacagaatggcttctaactttccattggctgcaataaaaatagccgtattccccattttttcacgaacggttgcgtaactgcccgctgatggagaaatagcgatgccttgtgcgtccatccatttgcggttccccgctgtaacggcgatgccgtcaatggttgccgcaattcctttcccttttatcgcttcgccttcctgcaagtggtaccggttaaacgggatgcctcttgcttcagcttctttcacaatcgtttggctgagcgggtgttcagagacggtttccgccttggctacaagcccgagcacttcctcttcgcgccttttgccaaacaggtgcacatccgtgacttccggctttccttttgtcagcgtgccggttttatcaaatacgagcgtatccacttttgcgagtttttccatcacatcgccgcctttgatcagcacaccgtgtttcgcgccgtttccaatccccgctacatttgacacgggagcgccaatcacaagcgcacccgggcaggcaatgaccaggaaggtaatcgctttgtgaaaatcacgggtaaaaacaaacacagcaagtgcaaggatgacaatcgccggtgtgtaatagttggcaaaccggtcgagaaaacgttcggtttttgattttgcatcctgggcttcttccaccagttcaatcatctttgcaaacgttgtgtcatccccgactttttcagcgatcatttcgatatagccggtatccaaaatcgagccgctaaaaacaggatcgttttcttttttcatgacgggggccggttccccggtaaccgctgattcattcacgaatgcccggccctttgcaatggtcccgtcaaccggtattttgccgcccgggaggactaccagcttgtttcctgcccggacgcgatctgcagccgtttttttgcgggttccgtcttcttgaagcaagatcgcttcctgcggggccatatccgccaattgctttaaagatgaacgggttttttttaatgtcctggcttctaaataatcgccgaacagaaacaggaaagtgacagctgcggattccatatattcgtggatcaggaaggcgcctgcaaccgccaccgtaacgagcaactcaatactgaacgttttcatcctggccgcttgccaggctttgatggcgatgggaagggcagcagcaacggttgccgccatcaaaaaaccatccctccaggcgtaaaagcccaaccatttcatcaataaaccaagaacgatcaaaacgccggcgatccatgccagatgatacttatgttgatggatttgttctaacattgggactccccctcacctgttatacgattattttaaaagagccccttgctttcatcattgacccttgtcaagattttggatttaaatatactctgcaggccgggccattgaaaaagtttgcagacaaaatgtcgggcgcacaaaaagcggcgggccgccattatagtggtttcccgccgcttgtttatttttttcagtgctttttaatggtgcccgccggctgatgttgcttcatcagcatacaataacagctcgtccaaatcaggaattttgattttcttatttggcagctgctctattaatccctgtttttccaggtttgtaaactttcggctgatggtttcgggggttgttcccaggtaagaagccaaatcttttttagacattggtaaggcaatcactgtatcatccgcgccgcttcgttccacacaactggctaagaaggagatgattctggattccacgttttcgaccgctacccgggccgtttgtttttccgattcttccaaacgcttcgtgatttccgttaaaatttttaaagcgatttggggatatgccagcaaataggcttgaagatccttctgtttcatcctgcagatggtcgaatcctgcagggcctctgcataattttcatgaatttcccccggttgaaaaacagccagctcgccggtaaaatcacccgggtttaatatgcggacaagctgctcctttcccgaatcagccaaccggtaaatcctcacttttccggtatggataatatacagcgtatcatctctttcccctgcccggaaaagcatttcccctttttgtaatgccagcgtttcaacagacgccccgattttcgccatctgttcttcttccagatggttgaaaatcggcacaagccgtatgcatcccgcatggctgttacaaccatgaccgggatgggaaccatggatatgatgacggcactccatatgacgagcccccctaaaaaaggatttgattttgcccaagcgctatgttcattggatgatggcttagcttctcatgccattttacccggaaaacgctttacagacaaattgccccggctgcggtatagatgatgtgtggcgatcacaaaacagctcgtggaactgcacggggctctatcaatgtcaaaagcgaacctggcaaaggcactgtggtacgcattcttttgccggtattgctatgaaattatgcggcagcctacaccgtttcaagttccattaacgagaccttttcttccagcgcaatgcgcgcatttttagttgccagctgcaccatttcttttttctgcccgcgtttcggctgcacgatacgggcggaaatgcacatttcggccgcttccttcccaactgctgccggaaggagcatttcctttggaaacgcattgcccccattgccataaaaatgctgtaaaaagccaagaaatgcccttcccggctccttgcttccgatcggcctgaacataacctccctctccataatcctgccatcacgcatataaaaaacatggacgcacatcaagcctccttgcacagcaaagccgaatatatcccggcttatcgggtcgtttagcacgatattttgatgtaccatggtcacttcaatttgcataatttgttccttcagttgttccgctttttcaaaatcaagctgagttgctgcctggttcatttcttttttcatgtcttttaaaacttcccggtaaccgccgtggaaaaaacggacaattttgcggatttgttccttgtattcttcttcacccacttcccttgcacaggtgccaatgcacagcccaagctggtaatacaggcaggggcgggtgcttgattccggacagcgcctaagcggataaagcctgtccagtactttttttgtctccgctgccgcccgggcattcggaaacgggccgaaatatttccctttatcacgccctgcctcgcgcgttaaaatgagctgggggtgctgttcatccgtaattttgataaaggggtagcttttatcatcttttagcatcatgttgtatttcggccggtactgcttaatcagattcatttccagcaccaaagcctccttgttggtcgctgtgacgatccactccagatcagaaatctctccggcaagctgcgttgttttcacattatgggaaccggtaaaataagagcgtacccggtttttcagcttttttgcctttccaacataaatgatttccctttcccggcttttcatcaaatagcatcccggctcttccggcaaaagggaaagcttgtgcaggataacggtgttcattgctgcaccagccccagctcgcggcagcgcaaatcaagtttccgggcaaaatctttacaggcggtttcgatttcttcatccgggacgacatctacttttaacccgtccaacagtagctcgcacccctgctttttcaatgcttcctccatcgtatccactgcggtggcgaaatgctcgtaaaacgagtcgccggcgccaaacaccgccccttttttgccggttaaatcaacttccggaagctcctcataaaaatcgatcatctcatcccacagatcgccctcatcccaagtatttgcaccgatcaaaatcagatcataaccggcaagctcgcgcggggatgtattggtggactctgctatatcaacggcataacccgcttctgtcagggctgccgcaatttgttctgccataaattccgttgtacctgtcatggttgaatacacaatgatcgttttcatcttttttcactccgatccgttaatatcctctctccttattctatatcaatcgtgaaaatgtgcatttgatctgcatcaagttttagttacggcccagtctaaaaattcccatgccggctcggcggcacttctctcttggacaatgaaagatttgaaagcaaaaacattttacttttctgcaaaaaaagggcatttttaaagggattttttattgtttgcataataaatatggatgaaccggtgaaaatgcgatgaaaaagatggacgggcgaatgtgtggatcagtaaaaagtgttcataataaggggactgaaccatgaaaagaagcacaaaaattactttattttcaattataggaataatactattcctctgggttattggcatattaagcttctacttaagatgagaacagataagaaagaatcaaagaatagaagcttcaaacagcttaaaaaccttcctttttacctctaagccgtttgaggcttcttcctggtataccctctttggatatctgatccggtttagataccgcccatgccggatcggcgtgcacatctatgcagataagtggaaaaaataggaatatattctcttccttgacaacaaatgctcgttggactatcatgggcttgaaaacgaaaacactttactttttcacaaaaaagaaagcgctcacgattatacttgtcgacaagtatactaatcttacaatcttatgaagaggaggatctcttatggaaatcgggatcgttggacttggaaaaatgggtatgaatttatcactcaacatgctggatcaccaagtggatgtaaaggcgtatgacacgtccagagatgcaaccgcacagttgtcatcccttgattcacgggcaaaatgctttccttcattggaagcgctggtccaaaatcttgaagcccctagaaaaatttgggtgatggtgccgtccggggaaccgacaaacgaaaccattaacaagctcagcaacttgctcagcgccggcgatattgtcattgacggcggcaactctcattataccgattcatgcaggcattatactttgcttcaaaacaaaggcatccattttcttgatgtcggcacgtccggcggaatcagcggagcccggcatggcgcctgcctgatgatcgggggagacaagccggtatttgatcagttggagcccctttttgaaaaaatttcggaaaaagatggatatttatacaccggaaaaccgggaagcggccatttcctcaaaatggtgcataacggcattgaatacggcatgatggaagcattggctgaagggtttgaaattcttgaaaaaagcccgtatgactacgacaaccaggctgttgcaaaggtatggaaccacggatccgtcattcgcagctggcttgttgaactattggaagatgcattttcgaaggacgcccatctcgacgaaatcagcggggtcatggcatcgtccggtgaaggcaaatggacggttgaaaccgcacttgatttacaagcatccataccggttattgccttatccttaatgaaccggtaccgttcccttgaaaaagatacttttaccggcaaagtggttgccgcactccggaatgaatttggcgggcatgcagtgacccggtccggccagtaagctacctgaaatggagacaggcttttcggaatcaaatttacacgaacgggagttttgaatatgctacagttccctgaacaatggatgaaaaatgcatctcttggcgagcagatcgcaaatgaattgcgcctgctgatccttacaaatgaaatcaaacccggcgacatcatttccgaaaaccagattgcccggaaatacggaacgagccgttcgccggtccgtgatgcattgaaagctcttgccaacgacggccttattcaattggaaagaatgggcgcccgcgtattgggaatggggctggcagatattcatgaactgtacgatgtacgtgaaatgattgagatttttgcgcagcaaagagtgtctgctgctccacaggaacagttgatccagttcctgaacgagacgatcgataaaatgaagattgcagcaaaatacgagaaccacagcgatttcgcctattacgatttttctttccatgacaggatcatccgccatgctggccataaacggatcttgaatctttggaatggcatgaagtccctgatcatggccgtactcctcgtgacaacggaagatgtttttgcccacggccccggccatctggcatgggtcattgaaaaacaccgaaaaatcgtaaacagccttttaaccggaaacgaagaaaacgtggaacaatctgtttctgcctattttaaagactcgaaaagaacactcgataaatcttttccggaagagggaaaaacggagtaggcgtagcctgcctggcacagggttttatattccaatctcttttcggcaatctggcccggaaagcatcgctttttattgcattcaagttgtcgacaagtattcaatgaatttgctacgttcgctttaacatactaaaaaggaggcttttatgatgcatgacgcctgtatgataggggttgatatcggtacaaccagcaccaaagccgtgctttacagaactgacgggaccattttggcaaatgccaatcaaggttacccgttgtatacgccggatgcatttactgcagaacaagatccggaccagatttttcaagctgtccttcatgccattcaggccgttacagcgaagagcggccaaagccccgaaacaatccggtttgtcagcttcagctgcgccatgcacagtgtcatccctgtagaccgggaaggcaaaccgcttatgcgttgcatcacatgggcagataaccggagcatgggctggtgccgcaaactgaaagaagaattgggcggccacgaaatctatatgcggacggggacgccgatccatccgatgtcccctttgccaaaactgatgtggctgcgccatgaaaggtctgaaatctttcaaaaagcagcaaaatttatttcgattaaagaatatgttttttaccgtttgttccatcaatacgtggttgattattccattgcctcctgcaccggcctgatgagaatggataacttgtcctgggatgaagaagcattaaaactggccggattaacggcggaccggttatccgaacccgttccgacaacacatataatgagcgggcttgatccccggtatgcagaccaaatggggctgggcaaagatacgccatttgtgctcggcgcaagcgacggtgtgctttcaaacctcggcgtggacgcgattgatccgggggtggttgcggtcaccatcggcacaagcggcgcgatccggaccgtgctggaccatccttctgctgacccaaaaggcaggcttttctgctatgaattgacggaggataaatgggtggtaggcgggcctgtcaataacggaggcggcatcttgagatgggcaagggatgaatttgcagcttccgaggttgaaacggcgaaacggctcggcatcagcccttatgatgtgctgacaagaatggcatcgcgtgtgaaaccgggtgcggatgggttaatttttcagccgtatttcagcggggaacgcgcacctttgtggaacccgaatgcccggggcgccttcttcggcttaactttgcatcatgaaaaacaacatatgatccgggccgtactggagggcatcatttacaacctttacagtgtcatgctggccatgaaggaaagaaccggagaaccggcacggatccaggcaaccgggggatttgcccgttcaccgctttggcgccagatgatggcagatattttcaatcagccggtcaatgttccggaaagttttgaaagttcctgtctgggggcggctgtgcttggcttgtatgcgaccggggaagcggacagcctggatgtcgtttccacaatggttggttctttacatagccaccagccggtcccggaaaacgtggcggtttatgagcagctattcccgatcttcatccgcctttcgcgcaaactgaacgatgaatggaacgatattgctgcttttcaacaatcgcaatttggaacagacgcggaaacatgaacgatataagctgaatttgagtttttatatcaaacccgagcacccatgcatgatgcctatttttacagcaggcaacagtactgcgatatttttgtgccttttatacaggattgaccgcggcctgaataaccgttctgcctttgcaaaacgaatgcgaggcaagcagtagccgcgttttaaagcatacattgcccgacgccggccgcgttttaaagctgcagatgaatgccggctttagccggacattttctccgtttgaaccgggaatgtttttcagccggctccggaaacaagccagccctatttatacatcggcggtgttgcggacgggggaaaggccccctgttttgcatccaactgatagaggccattcgcttcatcagcagctgatgcccttaaaattataaaagaaagcagtgattttcatgagcagtgcttatctcatcacgataaccatccttgccattgcactcgtcattgtcggggtcacatggttaaaatggcatgcattcatcagtctgtcggttgctagtttggctcttggccttacagccggcctgccaatcacgaaaattgtgacggactacgaacaaggtgtcgggggcattctcagttcattgctggggattctcgcgctgggcaccattcttgggaaaatgatgtccgaatcaggcgccggtatacagatttcaaattacttcacccgggcattcggtgaccggaatcttccatgggccactttctttgccggcttgattatcagtattccggtattttttgaagtcggccttgtcattttgctgccgcttgtgattgcaatccaaaaaacaacgaagaaaaatcttttgctgattgcgatcccgatgatttctgcattatccatttcacacggcattgtcccgccccatccgggagcaatggcagcgatcggcatttttcatgccgatgtggggcaagttttgctttattcattgattgtcgctttgccggccggtatcataggcggcccgttatttgcttattacatcagtaaaagggtaaagccggagacagaaccgaaagtagtggcggcaaatgtttcggcaacctcttatccgtctgtcggggtttccttttttacgattttactgccgattatcttaatgatcggaacggtgattgtcccgttcgtccggatgcctgcccaattggcccattttttaaattttatcggaaacccgctgattgcattattgatttcagtgttcgtcgcctattatttgcttgggaccagacagggcatcggacggaatttgatcaataaactgaccggggaatccctcgctcctctcgcctcgatcatgatgatcatcgcagcaggcggggcatttaaacaagtgctgatttcctccggtgtcggcgatgcgattgcccaggttgccacgcaatggcagctttcaccgcttgtcatggcctttgttgtagccggcctgatccggatcgcaaccggttctgcaacggtcgcgctgaccacagcagcaggcatcgtcgatccgattgtcgtccatatgacagggatcaatcttccgcttttggttattgcaaccggcgccggatcgctcatgttctcccatgtcaacgatgccggtttctggcttgttaaagaatatctcgggctgtctgtcaaacagacatttaaaacctggaccgtattggaaaccttgttgtcgtttgcagcattcttcatcgtcctgattatcaatctgtttgtataatcaggcaaaacatgggagggtcctccgagcacaaaaataccctggcgaacactgccagggtattttttgcacttggctttaaacaaatccgcttaccggtgctcccgcctcgcgaaatcgacaaaccggaatttgtccagccggtggcgcgattcggtatattgcaaaaggcttgcatcatccaaataaacatggttccggacaacgacgacatgattgtactcgcccatgtccagatacttgtagtcttcctctgttgctttttcaaccgtgatttcttttttcgcaaagctgatcacaaggccgagcgttttttcaaaatactggtaaagcgagatttcacaaatatctcttgtaatcgacgggacaaactttttccggatgtaatccttatccaaaatgatgttctcatggtcaatttcccgcgaccggaccacctgccatacttcttcttttccggatatcttcagctgccgggccaaggcatcgtcaggtctgatgaggacaagttcatggacattcgtgcgccatggcttccccgagctttccgcaatttcacggaagctgacaagtcctgaaaccggaaaatcaaacttttttacgtccagtacaacagagcctttcccccggattttttgaatatagccattctgggataacagattgagggctttccggatcgtctcccttgaagccccgaattgttccgccaaaatatgctcggatggcaggaggctacctgcttccatttcgccgttttcgattttttcagcaagctgatggtaaattgtgtaatacttgttttctttcatttgggatcaccatttgtattgtaccatggcaaaaccggcattacgattctgtcaaaaaagtacacaacagattcatacggacgcagggtgaaagaatgaaaatccagagaagaatcgggatagttggaaagcaatatttgagctgctccgtccagtgtacccggtagctcaaactgcaccggttctccgtaaaaattattcacgaccagcagcttgccgtcttcacttgtccgcaaataagcaaagatttgcggatgatccggaagcaatagctgaaagtctccatctgtgatgacctcatacgtttttcttaactgaatgagtttttgataatggtaaaaaacggagtttggatctttcagcgctttttctacgttaatatcagggtagttggaagcgaccgcaatccatggcgtgccttcagtaaacccgctgtttttcgtactgtcccattgcatcggtgtgcgcgaattgtcccttgatttccgcattaagatttccatgatttccgcgtggctttttccacggctttgtaaaatgttgtacatattgagggactcgacatcccggtactgttcaatccggtcaaaatgcgggttggtcatgccgatttcttccccctggtaaatataaggcgttccctgcatcatatggatcgccgttgccagcattttcgccgattccacccggtacttgccgtcatcgccgtatcttgatacgattctcggctggtcgtgattgcaccagaataaggcgttccagccgccgcctttatgcatgcgcgtctgccatgtggacagaatctttttcagtgctagaaaatcaaaatcggcagatgtccacttgtcgccgttttcgtaatcgactttcaaatgatggaactgaaacaccatgtccagctcacgggaagccgggttcgtatagcggatgctgttttcaatcgtggttgaagacatttctccgacagtcatcgcattgtatttggaaaacactttttcattcatttcatgcaaaaatgcatggatgcgcgggccgtccgtataaaatttgcgcccgtcgcccggcgggactgttccgtcatcatcggggaaatcctgatttttggagatcaaattgatgacatcgaggcggaagccgtcaacccctttttcaaaccaaaatttcatcatggtgtagacttcttcccggactttttcgttttcccagttcaaatcggcctgtgttacatcaaacaggtgcaggtagtattgcccggttttttcatcgtattgccatgccggccccccgaacttggaaacccagttgttcggttctttcccgtctttcgggtcccgccaaatatagtaatccctgtacgggttgtctttcgatgatgcgctttcgataaaccatctgtgcgcggttgaagtatggttgacaacgatgtccatcatgatttttatattccgtgcatgcgcttctacaagcagctggtcaaatatttccatcgtaccgtaagtctcatcaatggcatagtagtcgctgatgtcatacccgttatcgcgctgcggggacggataaaccggcgtcagccagatgacgtcgatgccaagctttttcaaataatccagtttctcaataaccccttcaaggtcgccaatgccatccccgtttgtatctttaaagcttttaggataaatttgatagacaactgcttttttccaccaaggttgttccattttttccactcccgaattgctatcgtcgtaatgccatgaaggcttgaaatatgatttggacgttaaagcgaactatagccggaaagcggcctgccattgtacagtccgcttccctgtcctttatgctttttgtctttttaatttgccgaacaagaaggtcagcacgaacggcacgacaatgacgatcaccataccggtaaagaacgttccccacgaatgcgggaagatggataagaatcctgggatcccaccaacaccgattgccggggctttcacatgtccggttgccagtacaatccctgcaatggctgagccgattagtgcgcaaacaaacggatatttgaagcggagattgacaccgaacatcgccggttccgtaatgccgagataagcagaaacggaagatgtgccggccatccctttatccactttgttctttgccaaaaacatcatggcaagcgcggccgaaccttgtgcaatattggacatgcagagaatcggccacaaatacgtgccgccggcgcttgagatcaactggaagtcgaccgcaaggaaagcctggtgcatccctgtaatgacaaggagcgcatagcagccgccgtaaagcaggccgccgattgccggcacatggttgaatacatatacgacaaggccggtgatccagttcccgatgccgaaagtcaacggcccgactgcaacgaatgtcacaaatccggttacaagtaaagcaatgggggcgacaagcagcaactgaatggcatccgggatccgttttttcagccataattcaagtttcgccagaataaaggatgatacgaggaccggcagcacctgcccctgatagccaattttattgacatgccagccgaacagattccataccgggatcgagtggcttttcagtgcttcaccgtatgagtaagcattcaataagtccggatggatcatcattgcgccgagcacaatcccgagaagcggattgccgccgaaccgtttcacagccgaccagccgattaggattggcaggaacgtgaatgcggtattggcaatgatgttaatcatgtccgcaagcccggcccagctttcgtgaacctggataaaagacttatgggcgtaaaaaatgccccggcctgtcaaaagattgtttaaccccattaacaaaccagctgtcacgatggccggcaaaatcgggatgaaaatatcggaaagcattttgacaaaccgttgaagcggattcattttctttgcggcttcgtttttcacatcttcttttgaagcgtgcccgatgcccgtcagctcaaccattttgtcatatactttgtccactgtcccctggccaatcacaacctggtactgcccgtttgctgaaaaagaacctttgacaagttcgatttccccgagcttttctttgtctacttttccttcatcttttaatgcaaatcgcagccgtgtcacacagtgcgttgccgcggcaatattgtcttttccgcctactgcttcaacaatttgttttacagattcattgctgattttcgccatgttgtcgttcctcctgtcttattggcgatcttacaattgggccgtcatgaccaccgtttctcccggcacggcatccaaacttgtttttttgtcaagatgaaccgcctcgccatttgtcaccacgatggatgtgatcgaatccgccgctttttcttgaatccattccaggtcaaaagtgatgagcgtatcgccttttttcaccttatctccatcttttacagcggtttcaaatccttccctgtttaatgtaaccgtttccaacccgatatgaattaaaagttccagcccggatgcgccgcgcagcccgatggcatgcttcgtcgggaagacttgcaccacttccccgtcaaatggcgccacaaggaggccttcggttggttttaccgcaatgccgtcccccatcattttttcggaaaaagttgggtccggcacttcttcaatggcaacaacctgccctcttaccggagcaaaaatacgttcttcctttggcttcttttgaaataatttaaacatgattgccacctcactttatttcacaaaaccgttttcatttactcgtaatcttgtatatacatcttacattctcatcatatcctgtatatacaagtttgtcaatagcgctttctttttcccagaaataaaatgctgccggtgtttcatggggtgggaaaatacgattcaggcattgattgaagaggcaaggggcagactactagatatgctgatgctagggcagggaattgaaaaattgtggcaggatcgtggaataacctaacatgtcgatggacgagggcaaaaataaacttaagcttttaccataagctcaagcacccatttgcatgataactccattttacagcaggcaacaggctgcaatattttgtgcattttatatcgcagacaaatttcgtgccgggcaatttccacccgatacggggcgaaattcccggcacagattaaaactttggactacctttgcaacaacaggttcacgcattcaacgatgcaccgtaacgtttccgcggcacgccccggcataatccggtcactttttcaggagcccttcttttactaaaaaggctcttgccacatcttctgctttcttgcctttgacactgacttcataattcattttctgcatttgggtgtttgtaatcttcccggccagcttgtttaatgccggcacaatttccggatatttgtcaaccgtttcctgccgcaataaaggcgaaccctggtatggcgggaagaaatgcttgtcatcttcaagaacgaccagatgatacctttgcagttcgccatctgtggaataggcgttcatcagattcactttgccttgttggatggcatgataccgtacagacggatccattgtcaccacatgaaaatgcaatccgtatttttttgacaaaccgggatacccgtctttgatatcggcaaattcggggctgaacccggcttttacgtactgctcgacatttacaaggtccgatatctttttcaaatggtatttctttgcaaaactttgcggaaccgcaatcgcataagtatcattaaatttcatcgggtgtaacaatgccatgttgtattttttggccataccttctttggcttgtgcatacacttccctgctgtctgtgctaacagggttctctttcagcaggttgacgatggctgtcccggaaaattccggataaagatcgatatcctttgactgcaacgcattgaaaacaaaggttgtatcgcccaaccctgtttttaacttcacttttaaatctgtgttctcttcaatcagcaacttgtacatattgtccagaatttccggttccgaccccagcttgccggcaatcacaatcgttttttgcccgtctttatgaagcaagtttggcgcaaccagtgaaccaacgatcaacacgatcatcaagataaaaatgccggatgccaccatcatcttcttaaaagaaactttttcaagctgccggagcaaaacatcgaaaagaatggccaacagggccgcaggaatggcgccgaggatgacaagggcataatcattccggtcgatgccaagcaggataatgtcgcccaatccgccggctccgatcagcgccgcaatcgtcgctgttccgataatcaaaatggcagccgtccggatccccgccatgatcaccggcatggccagagggagctccactttgatcagccgttttcttctgttcattcccatcgcccttgctgcttccaataacgaaggatcgatttctttaatgccggtataggtgttgcgcaaaagcggaagcagggcataagcgacgagcgcaatcacggccgggacggtccctatgccaaaaagcgggattaacaggccaagcaaagccaaagaaggaatggtttgcagcacgccggttatgccaatgatggtttccgcgattttttgtttacgtgttaaataaatgccgagcgggatcgcgatcaataacgagaaaaaaagcgcaattaatgaaatttctatatgttgtaaaagggcgtccaaaagctgggatctccggtctgaaaaggtgttgataaaactactcatgcatccggcctccatcccttaagtattgtgacatggctttcatggcgtgcggccggttgatcaccccgaccgtttttccgccatccataacggcaatctgttcaaacgaggccagctgttcgaatacctctgccaatggagcctgtaaagaaacggttttcgtatggggcaataatgcctgttcgtctgtaaccgggaccatgagttcctccacgcggaccggcacctgtttattcccgacaaattcgcgcacaaaatcgttcacggggttggttaaaaattcatgcggcgtcccaacctgaacgatttccccgtctttcatgaggcaaatccggtccccgagctttaatgcttcccgcatatcatgagtgacaaaaacgattgtctttttcagcctctgttgaatttcaagcacatcatcctgcaatttttcccggctgaacggatcgagcgcgctgaatggctcatccatcaaaatgatttccgggtcggcagccaaagcccttagaacgcccactctttgctgctgtccccctgaaagttcatgaggtttccggttccggtattcttccggatccaggcccaccatttccagcagttcatcgacacgggcatggatcttttttttgtcccagtttttcagttccggcacagtcgaaatattttccgcaatggtcatatgcgggaaaagcgcaatttgttggagcacgtatccgatatcccagcgaagttcatgaatgtcataatcgctgattatctttccgttgattcggacccagccttttgacaattcgataaggcggttgatcatttttaatgttgtcgtcttcccggagccgctcgggccgatcagaacgaaaaattcccctttttctatttccaaatccaaagactttacagcaagggtcccgttcggaaactgtttcgatacatgttcaaaccggatcattttatctctcctttatcatggattcctgattatccggcacttggtcttcaccgggttttcggaatagaatgtttctgcattcagcgggttcgtgggctggggcggcgttttttggcaaaatgcctgcccgctccttcatttatagcctgcctgtgtttatttttaaccaaaattttgcgggctctcattacttagaacggttccattccgggccggcataggatatttttacaaaataaatccgtccgaaaagaacaattgttcctcattatattacatagactgatggtttgtctacatccccgcttactcattgatatacccctttggaaaataaaaaaagcggatggccccgccgtgaaaccgtggcgttccccggcaagcaacccggccgggggacgcccattgaaattatttttgtcagaaccgttcccattgccatcagggtccttcacccgtgtcattacttgacaacaggctttccctgcatcataccaaaacaaaacagcgcttaccggacgaatcgggatcacccctcaattggaatcgttcagcaagcattcgcgattacgcccggccgcgaaaaacttcccggttaatcaaattgggcgggcattctccaagcagccccttcgtgagattttcaaccgcaagttttgccattgcatatcgtgtttcatgggtagcagagccgatatgcggaagggtgacgacattgtccatttttaaaagcgggttatccggcgaaacgggttcctgttcatacacatcaaggccggccgcataaattattttttcctgaagggctttgacaagcgccgcttcgtctactgtcgtgccccttgaaccattgacaaaaacggccgttttcttcatcaatttgaattcccgttccccgattaaccggtgcgtttccggggtaagcggcaccatcaggcaaatgaaatccgatttttccagcagttcatcaagctcacagtataccgcatcatacagctgctcggcttccgggtcgcgggaacggttatggtataaaatgtccatatcaaaaccgaaatgggcccgtttcgcaattttgcttccgattctgcccataccgataatgccaagcgttttatggtggatatcaataccgtaatgttcagtagaaacaggcgctttccaattgccgtttttgacaagccggtccagttccgtaaatcgccgcgccgctgcaagcatcaagccaaagatggtatccgctgttgtttcatcgagcacacccggcgtattggttgccataatcccccgctctgttagcaacgggatatcgagattgtcatatccgaccgttatattgctaatgattttcaaggccggtgcgtggtccagcaattcttttcccgcctggagccaggaaccgagcagcccgtccgcttccgttaagtcaggcagaagatcggaaatatcctttccccccggtatgtagcgtacttcaaatatttccttcagcttttcaatcaaatccccaggcagttcgctgtataccaatacttttttcgccaaatgagccatccccctttgtttacgttattcttgtaaaattataacaaagaataaggcgagcgtcctttaaccgggtttccggaatgtgcgattttttgtaatctcccggccaaaataggagagggtaagaaaaagccaatcctggaatcggggtgttgaagcatggtattccttatcgtttttgatgatcgttctgaatctgtttgcttttctcatgccaaaaaaatttagcggcattgaaatgctgtgcaccaccctgtttgccatgtgccttgaattaatcgtcaatttatttctggatctcaagtatgatctttttggatactttacaaaaggagtcgactggaaagccctttgttatttgtttgggatttatccggccatcaatattacctttatcaacttttttccaaacaggttccgcacccggttcctctatattgcaggatggacgatcgtggcgatggtttttgagtttttgttcatcatgacgggtacgttttactacaatggctggaaacctgtgtattctgctattgcgtatcctatcctcttttgcatcctagcgttattctatcagcttgttcacctgcttttgctcaaatataccccaaaccgctaggcacccaaataaatggttaaagaaaccgcggcactgaacgccccccgggcttgtggcagccgccgtatctggcacgggaaaagtctggcaggatttgctaaaatagaaagaaagtcattgaggtggagacattgaaaaacaaagttattttgcttgcatcggatcagcttggaaaaggcgaacaagaattgggagaaggattgttggaaaccttctttaccatcctgaaacaaaaggaagaactgccggccgctgtgttttgcgtaaaccgcggtgtgtttacgttaacagaagactcgctcgtttcccttcaattgaaagaattggaggaaaaaggcgtggacgttcttgcttgtaaaacctgtgtggacttttatgggctaaacgaaaaacttgcagctggaaaaatcagcagcatggcacaatttgcagaattagcatccaaatatgaagtccttacgttatcctgaccaggtggaaaaatcctatccggaacaaaaaatagagaaaaagccctgcatcaggcagggcttttcctgttcttgccaaatcccagcgatgtcacgtgcgcccgaccaacatcgaaatgccaaggccgccaccgacacaaagcgaggcgaggccggtgcgcacatttcttttttccatttcatataaaagtgaaacgagaattcttgcgccggatgccccgatcggatgccccagtgcaatcgcgcccccgttaacattgactttttccggatcaagccccaaatccctgataacggcaaggctttgggaggcaaaagcttcgttcagctcgattaaatccacttcttccagggatacaccggtcttttcaagcagcttttgaattgcgtaataaggggcataccccatgatggaagggtccgttcctgcttctgcataccctttgatgaccccgagataaggaatctttttttcatccgcaagtgatttttccattaaaactacagcagctgcgccgtcattgatccccgaagcattccctgctgtgacagtgccatcttcgagaaaagcgggtttcagcttcgcgagcccatcaagcgtcgtttcggggcggacatgctcatcctcggtaaacagcatctcgcttcttctctgttttatttttaccggcacaatttcgtctttgaaacggccggccttttgcgcctgcgcggctttttgctgggattgaagcgcaaaacggtcctgttcttcgcgggaaatgccgaattttgccgccacattttccgccgtcaaacccatatgaatgccttcaaatgcatccgtcaggccgtcgcgcagcatgctgtctgccatcgccatattgccaagcttatggccccagcgtgcctgctctgcaagataaggcgcacgcgacatgttttccgccccgccagcaaccgttattttcgcctcgccaagctgaatcatctgggcagcaagcagcacagctttcaatccggagccgcacacttcattcacggtgacggcaggcacttcatacggaatgccggctctgactgccatttgccgggccgggttttggccgaggccagccgaaagaacattgccaaaaacggcataatggacctcccgtgcagaaacgccggcgcgccggatcgcttcttctgcggcaatcgcgcccagttccacagcagatatatcttttaaactgccgccgaatttcccgatcggggtccggacggcgctgataatcgcaacttcatgcatatacgtttactccctctctgtcatttcccatccacaatctttgcaacttgtactataatgggaaggtgtcagtgtgtcgtgataagttgtatttcgacaccgtttatattaaattatttagtacagtttctcaaatttcaataacaattcctgtaaaaaaggtgtgaatagctgttgcaaatcggaatagacaagatcgggttttataccccgcatttatatgttgacatggaaaaattggcacttgcccggaatgaggaccctggaaaatttttaatcggaatcggccaggaaaaaatggccgtcgccccggtgacccaggatgcggtgacgctcgcagccaatgcggcgctcgaaattttaacagacgaagataaagaaaagatcgattttgttattttcggcacggaatccggcgtcgaccactcgaaggcagccgcaatttatgtgcaccgcctgctcggtttaaaaccggaagtgcgggccgttgaagtgaaagaagcatgcttcggtgctacggcagggctgcaaatggcaagagggcatatcgccctgcatccggaaagcaaagtgctcgtgctcgggtcggatatttcaagatacggattgaatacttcaggagaggttacccaaggggccggcgccgtcgccatggtcgtaagcgcccatccgaaaattcttgcgatcgaagaaccgagcgtgtatcatacggaagacatcatggacttttggcggccggtctattcggattccgcttatgtggacggcaagttttccaatgaaaagtacatcggtttcttccagaccgtctggcagcagtacagagaaaaaaccggctttacgttaagtgacttcgaagccatttgtttccatatgccatatacaaaaatgggcttaaaagcgctgagaacggtgctggatgaaacagatgaagacgggcgcgaaaggcttcttgcccattatgaaacaagcaaaagttataacaaaatcgtcgggaacatttataccggcgctttgtatttgagcttgctttccctgcttgaacaaaatacaaagatagaagcaggtgcgaggatcggcctgtacagctacgggtccggcgcagtcggggaattttttgccgggatcctgcagccgggctatcgtgaagccttgcagccggcccgccatcagcaaatgctcgatgcgcggaaagaaattagcgttgccgaatacgaagccatttttacaacatcgcttccaaacgacggatcggccgttaccttgccggtaaacgaggatccggccaccgtttgccttgccggaatcgaagggcacaagcggcaatacatcaataaaaatatgtaaaaaccagtggcatgctttataagcgtgcctctggtttttacagagggaaatgaccgcccccctttaaggcgactttcttttcaaaaacggggagttgcgccgtaagcccggcccccaggggtttcatcctgctttaaaggaaaaaacctgcctggccaaatgaaaacaaaaaaacggcgggacattaccataatcgtgtctcaccgtttttttctatattttgttcagtgccgcggtattcttggcgccgtttttcatacccgcgtgttttttttcttcctatttctgttcagtgccccgcctgtcatcctctgatttcttttaaaattttctttgccgtagcaagatcaattgtcccgctttgttttagtttttctgcaacccggtcaatttcgcttccggaggcgcctgcactgatggccagcgatttggcgtgcagggccatatgccctttttgaatgccgtctgtgacaagggctttgatggcggaaaagttctggccaagcccagcggagacaatgatcgattccagttctttcgcattttggtaacccagcaaccgcttgctgaaaccggcagcagggtggatgctgatctggccgccgactgtcccgaccggaagcggaagggtgaggctgccaagcaggtctccgttttctgctttgctccaagtagaaagggaacgatacttgccggaccttgctgcataggcatgggcgcccgcttcaatcgcgcgccagtcgttcccagttgcgatcacaacggcatcaacgccgttcataatgcctttgttatgcgtcgcagcccggtaaggatccgcgtatgcaaattgggcggcttcaatgatccggtcgcggacttcttcaccgggcatgccgtttttttcaagcaatggcacgggtatccggcactcggccgttgccaggcactcagtggcataattggaaagaatgcccattaacgcccgtccccctgtccactcttccaaatgcggtttgatcgcctccgccatggtgtcgatgatattcgcacccattgcttcccgcgtatcaatatggagatggacaacaaaaaaagcaggcgtgccggctttttcatcagccgggatcaggcggacttccagtttccgggctccgccgccccgcttcacaatcgaaggcttggcctcattcgccgtttgcaaaatatcttccgcatgggccatcaccaccgttttcgcacggatcggatccggaacgtccattaacgccacctgcccgatcatcatacggctgctcactgtcgtccggaaaccgcctgccttgttgatgatttttgccgccgaacttgccgccgccacaacagaaggctcctcaatcgccatcgggacgacatactcttttccgtcaatcagaaagttcaatgccgtaccatatggcaattcatatttggtaatctggttttcaatcatatggtccgccgtttcatccggcagcacaagccctttttcaagcagcgcagcatcttcggctgaaatggccttcgcctgttccagtgccttgattctttcaagtcgatttttttcgtaaaatttatgcaaaggttgcttgtccatgtttccctcctctgtgcgcgataaagtaccatacatttattttaacgcatttcagggggaaaaccagccatacatttttccagcttgccatcttcctgcgtgcatttcttatcttaacagccacgcagataatttttccataatttagtttactcagaagaaacggggtgctctccgcttcatagttgaattataaaaaattttgcctttttctcggtatctccgaaaaaagccggagattttcgttaaaagatataagaaaattgttattttctatggcggttttatcatacattcgtataattaatcttagaaagggagtaggaaaagcgatgctggatcacttcatcgatgcataaataccagcggagattaacgctacacggttgtatcaaacccttccgccaaaccgaaaagaggtggagaggattgtcttcttcctctctaaaacgatatcttagcatcgcacaaacgctatgaaaaaaatactgttgattttcttctgggcagctgttgcattgtatctttatttcggagacagatttaatcaaacacttcatcttgtttccggagctgttttatccgtaatcggtacagtcgttgttgtatggtatttcgtaaaattatttaagcgcagggaatcatctggcaaataaaaagttcgaacaggccttttataataaaaaatgggaaaacaaaaacagagagcacaggcgctatttacccctacgctcctccggccgttctttcattcggaacatggcaacagaggaagatctgaatgaacttgagcaactgatcaaggaaaaaagaagcattcttaaagattgttagcggcacaggggctgtcccaaaagtcgatcaatggctgatgggagtcccttatttatttaaccggctgctgattcactatatgggaccagcagacagataaagcgaggagtatgcctcatcatttgcaggttatgcctctgcagctgtacgccttctgcctccaattaacagtagaaatgcaataacaatataaaccactgcccccgtaaggcatcctcttaatgtgagatgggcatccacttccggcccgctactgataaaactaataaaatcgattgctgcatgaagcatgatcgggagtattaaacttcccgagcgaagatataaggcacataaaaccaggcctaaacaagtaacctggatgacctgcaacgttgtaatataaaatgattgatgaaaaaggttaataaaatgaaatccgccaaaaatcaacccggaatacaggcaagcttttattctccctgcataagccgcttttccttcgtttaaataggacctgttgaataagcataaattacagattaaagaaggatttcggctacttttcgcgaatataatgtgtaaggaaagctgtcggcaaatagtttcaatatgtaaaatgggacacggagaccattggaattatttggtacaaaaatttctccgttacttttgagcagataagtatctccctttaaggcaagtcctataaggttgacatttatttgatgaacatacatataaatttcggtaagccctcatagttatagtgatgtaggaaataaaatatgggagataaagtatatgagcaaacattttccaaatgtgagcgtggacttaatcgagtcggctaggaggagtgatggggttttaagtaggttatcaaaagaggaacttacatgttaaaaaacagatacttgaaattcctatatttagtgaaaaaatatccttacacctcaatctgccctacgtatgatattgacgaaatgtggcaccttcatattctgttttttgcaagaaaaaagtgcagagtattgcagtatataaattcgtttataccgcataaaaattcaatctgaattctcgctattaagggcttgacatggagcctctgcagccatgattcttttgccaagcggccagctgtaacagatttggcaaacccaaacaggttatcatggctacccctccatgtaaagcccctctgcataaccatttgcatagaaattttgcacatctctgcactttaattttgcaataaacaatattcttcatccacagaaatattataatgattgcatggattactttggttgtattttagatcataatcctggttatggcaaagaagaatctgagcttcctcatttaatgaatatatatagggagtctttgaaaaaatggtccgttgaatttaaagaagactataatataccgttatcagataaagttaaagaactagccaaaaatggcacgaatgctgaagtaaagacttgctataatgaaccattgaaagctgcaacctgctataatgaaccgttgaaaggtgaacaagaaaaaaagacttgcttaaacgaaccattaaaaactgaacaagccaaggttcagatttaaggtgaaaagtcagcaaacgattgtttataaggcaagcctattttaatttaggcttgcctttggccataaaagcattttttgggggtgccaatatgttaaacaacgcagtaaacagattaatacttgttgataccattaatacgctaggtaccgcaataacatggaccggtcttcccatttttgccctcaatctaacaggctcattcctttatgctggaagtttgtaccttacagaaacgattgcgggaataatatctaccattgtaagcggacattttatagacaaagtatcttctaaaaagatgatatttacttccttttttcttaattgctttgttatgataacattattttcattactatcatttaaacattttattatttttttattccctttgatgatcttatcccaatcacttgggcattttgctaatctgtgtcttgaagtatggtttagagatttgacaattaaagatccaaacataggattagcaagggcaataagcaagaaaaacacgtttactacaacttgtaagactgtaggttttactatcgggccgctcatttttggtattttaagttcgtacgccattctcatagactctgcttcttttctcgtgtgcgcgtttttaatcatgaggtttgatgaaaaaattcaaatcgaacactcgcatgatactacatggttttccttagcatatttgaaaagaactttaaaagataaaatactgcgaatttactttttctcacatttactaggtggcatgattggaccagtaatgacgagcctttcagtatatattttggaaggacattttaaagtagctgactttgaaatatctattttttggctcgttggtggtgtttttgtggttttatccaacatgatattatcaaaatccaggattttatccgcttcaaaggtatttttgtattttctaactgtctttttggtatgtgggggcattgttataatgggggcctccttaagctggatattctttatagttggatttgccattatgacaatgggaaaccccgtaataaataatttgctctccgctgaaacctttaaagcaatccccccatatgaaaaagggaaagtaatgggcgtgatggaggcatcagcagatctaggcaccctttcttttatgatcatttcttggggattaatagaaacctttgggatatttataacttgtatgataatcgccgttatggccatcttacggattaccttgttttattcttcatttaagataaaatcagatatcccgatagagaatataacaaaaaacctttaggagaatatgtcaaactctttggagaaaaccaccaaaaacgctgccggtaacatggttatcggcagaaaacaccaaaatgaccatatattttacgaatcgttgccatcccccttattactctaaagaggatccagggttaattttgggcagagtttcttttttcttgactatattccgcaacttcattttttcaaaaactacaaaatcgggggaagccgactaaaatttgtactcttctttaaataaaaaacacatttgattttcaagacagaggtgatataattcaccttaaaggttcctctttctggtttagtagtttttgtcaaacctaattagggcttgctgaacgaatcaaatttggtcagatacaagccaaattctgattatcaaaatataaaatagtgttgtgtaaaaaccagtgtgatcatattctggatgacggttcggattcttcttcttgttgttttctttttcaatggcgtatcttgttttctcaagctttcttgtccaatcaagcgaagcaggttatacgcaaatacaccgaaatggagcacaaggccattcgtttcatatttgcctgacggcagccgttcgagatccagttctgatttaatttcactatggaactgttcgcaagtgccatggttatgataaagagagatcaccacatgaggcggcacttcaaggtccgtccagtaggtttcaaattcatactcgggaattaaaaaaatttgtccgtctcttgagatggttctttcggtcactttaaaaacttttcggatgcttcgctcctggtccttaatttgaatggtttcggggatggatccaaggtaaaccttctttccttcccgttcttcacaacagatcccatattttcgggcaatgtacagccagtcctcagctttttccttacggggattgcgtttgataataaagcttgcatggttttctaggagaataatgagattatcccggctgtcatttccagaatcaagcctgaaaagcaatggctgatctgttagtttccgggcagattgaatggtttcctggatgaaatttggtgtacctttttggcagtggacacttccctttcgcatctcaacatgcaggcagtaaccttcctgtcccatgtaagcgaacataggggcataaccgtcacagcctttataggttctttcgacaccttccttttttgttttggagttatcgaaaggggagacatccagatcaaccgggatatacggcttgtctttggcgtaaaccgggctgatttccgcatttgtatggcgaatcagatccagcgattcttcgtgcaagatcgttttccatttttccaccaaggcggcctggtccaatcgttgcctgagagtcgggctggaaggaaccctctggatatccaaagccagtgcaaaaaaagcatcatcacggaaggtttcaatattgtcataatcactttttccctggcaaagcaagccgatataagatttagccacatcgccattggaacaagccggatatcgggagatatcagggagtttataggcattcaacctggaaactaaattcgtttgatttagtaaatttcctactatcgctaagccagcttgggcaacaattcgttcttttgtgggttctatcacaaactttttcatgagatcacctgaatgtggaatgaatttaatttgtctgatatactaattatactaaattttatgcgatttgtttgcctttaagcggaaatttcgtcacggattcaggtnnnnnnnnnnnnnnnnnnnnnnnnnnnnnnnnnnnnnnnnnnnnnnnnnnnnnnnnnnnnnnnnnnnnnnnnnnnnnnnnnnnnnnnnnnnnnnnnnnnntatttttttatccttttttcaaacccttgggctacaaggagtctgtaacatcgcaattacctctacctggaaaaagaaacgggaaccggatccggccccgctccaatatatttatattcatttcaaatgcttccatgcatcctgtcctgcatcttttattttataccaaatccattcaaaaacttcattaatttcttccacatttccggtaacgtcccccgcggaggccatgtattcatttccccggaccaccgtcacattcccttccactttcccttcaatccggagatcgccgtttgttaccgtaatgtcctctttaattacttttcccttcggcacaatcgcggtatgcccctggacaatgatgtctttgtttttcgttatggaaaactcgtccgggttatgccactcggaaaacatcgcgcctgccattaaaatgaagaacaagccggcagaggcgagaaacgggtgcattttcaaccagcggcccgccccgatccgttttttctcccttggaagatttttcatgatgcggcctgtaaatccgggaggcacctggacattcggaaggctttgcacgtaaaagatgcttttttgcagctcataaaaatgctgccggcacgcacggcatgtttccaaatggtactcgagaatttttttatggtcttccggaatgtcttcatctaagtattcatgcatatacagtacaattctctcagaacatgcctccatatttttccctcctcacagcctgcctaattgctttcgcagcgcctcacgcccgcggtggattcttgtttttaccgttcccagcggaatgtccagcatttcactgatttcatttaaagataattcttcaatatactttaaaacgatcataatccggtatttttccggcaattttaaaatttcccgctggatcatttcctgcatctcaagtgtctccacctgcatatccggcaggttttcctccgccggtacggttgagtaaagggtcagcccttccgtcccggaaatttccgcatccagataaaaatccggcttcttcttgcggatccggtcaatacacaaattagtagcaatccggtacaaccacgatgaaaatttccgttcctgcttaaaacttttaatatggatataggcgcggataaacgtttcctgcgccagatcctccgcttcggtgcggctcccgatcatgcggaaacagatttggaatactttatctttatataattcaacgatatcattaaaagcattttggtcacccttcatgacctgcttaatttttcggtctacaattgcttccattttccccctccgccctgtgcggtacgttatttttacgattttctcctgaaaaggtttcaaaaaaagcaataaaatattcaagtctattgtagcaaagttatggaaaaaatgtttaaatctttagtaaaatggatataaaattattacaaatttgaatacgaacggggagtcagggatgaaccagaaaagccaagccttaatgttggaaattgaggaaaaaagacgtgaaatgattcagctcgcttcgaccactgcgtattgggacgaccaggtcttacaggcaagcaggcatctggaccagctcatcaatcaatttaacaaattgaaaagcagtaaacttcagggataagtggacagaacacccatggaatagatttaaataaaaaaacggcaaagcgtccatcatttgccgttttttttatttgcgtgccgggcaccagctaataggggctttttttaaagaagttttttcccgaacaatgtttcaatcaggcggacagctttttctgccgtttgattgcggctgtcaagaatcgggtttacttcaacaacatcagctgaaacaacggcatttgcatcgtgcagtatctccatggcgagccggctttcgcggaaatgaagcccgccgtatacaggcgttcccacacccggggcttcttgcggatcgagcgcatctaaatcgagcgacaaatgaatgccgtccgttctttcttttaaatagttaatgcttgctgccatgacgctctccatcccaatccggtcgatttcagccatcgtgtaaattttaatgcccaggttgcggatgaaatccttttccccttcgtccaaatcccgctgcccgatcaggacaacatgctccgctttcagtttcggaatatagccgtaaacgcccgttaaagaagcatgcccgtacccgaggctggcggcaagcggcatgccgtggacatttccggaagggcttgtctcaggagtattcatatccgcatgcgcatcaaaccaaatgacgccgagatttctgtaatgtttgctgatgccggcaattgtcccaatggcaatgctgtggtcgccgccaaaaataagcgggaaccggttgctttttacaatttcatctgtatgctctgcaatgaactggctcgcttttgcaatcgtttttaaatttcttgcattgacttcgtcatcagggagctgctccgccctgccaatttcaatattgcccaaatcggtaaccgcgcagccgagtttctcgagtccttctttcacacctgcataccggatcgcctgcgggcctagatccacccctttataccgctgcccaagatccattggaacccccattattgcaatatgtttctccatcagactgtcccctttccttctctctatccattgtaaaattgttttccaattggctcaactgtacaaaattctgtataattattcaagaaaatggaggtgagactattcatcttaaaggggccttccttcaccaatccagaaaacccatcaaccatccgccaacaacactggagttgtattatagagtgaaaaatatttacagacaaataaaaaacgctcaaacccttttatatcaagaggtttgagcgtttaaactttaagcggaagacgggactcgaacccgcgacccacaccttgggaaggtgttaggcaatttaggaactcgatggaaatgaatcgaaaaccattggtataagtggattttaaaaattagttatctgattttatggggagtaaaatggtcaacaatgatgaatttcgcctttgaattttttcttgaaggacttggcatacttttcttcggccatccaccaaggaatcatttcagcaagacggacccagcgattttctttatttaatttcccaccgaatggtaaaaaaaatcatctacaaaagttaattgatgttcggtctttttgtacatcgtaacagcctccaagtgcaaggttttttacgtgtttcctttgaaatccttacactttatattcgacaaaagtagccaaaatccttgtcaaatctggaatttttgcttattcagcaagccctaaatagaaattgattttagaaaaaataattcccctgaaataatattcttcgaagagcgcgacaatcactgaaatcccgccggcctttaatatatctagcaatgcatgaccggaagataccaatatatcaatcataaagaaaaagaaaacgggtatcatgatcagcagtgtttctttaaaagaagactttatccgccatgttactttttgttttaaaaacaacacatttaaaacgaaaacacttataagtagcaccatttcttcaacaaatattttcgtgatgtccccaaaatttgcgacaaatgtgaatcttaaacaaattagaacaaaggcaacccatgccatcgaacaaatcattacccaataatcacatgtttttctcataaacctactttaacagctcctcattttgtgtctagttttatgggtccattataaccagccattcgtatcatttttcaaaccaaatatgattttaacatatctcaggctgtattccggcgttcgctttttacaagctgtgtcatatggctgatcaaggaaaaaagaaacattcttaaatgctagcaaccgtattgatattcggcaaaagcatctaaaatcctttcttcagctgaattttttttatgaatgcagtcattgccgtacggctgaaaaaacggccgctggcgatcttaaaaaaacactggtattctaagccctgttaccgcgacaacaataattaaagccctcctcttccattaataggaaaaagaaggctttgattcgcttatccattaccccagcacttcttcggcaatgtaccggtatgaagcaatccggtcctcaaaagaatgggcaatggtcaaaatcatcaattcatccgttccgtatttttcctgcaacttggtgaatgccgcgcgcacttgctgcggatttccgatcaccatgttttgcttcatttttgccaatttttctttgtcttttccggttaatggataagattttgcttcttcaatggacggcacggatgcttgtccccctttttccgcctgcagctgccatattagggaactccatgccacttcttccgctttttcagctgtttcggcacatacggcggaaacagttaacaacgtttgcggcgcatcccccggctttcggggggtaaaagcctgctcatattgctttaaaattgccgcgccatcctgttcgctcataaactggccaaacgcatacgacatgccagatcgggcagccagcacggcgcttttgccgcttgtgccaagcagccaggcatgcggcggatcagccggaacaggggcagccttgacgcgggaaaaaatattttcttccggaaaatcgtgatagagaaaatgaagcagttcctctaccagctccggcattttgtacactttttgcaaaaattggccggataatgcggtggttgcttcggcagagccgcccggcgcccggccaatgccgaggtcaatgcggcccggaaacagcacagagagcaaattgaacacttccgcgactttatacggcttataatgcggcaaaagcacggccccggagccgatccggatcgtgctcgtatgcgcgccgataaaaccgagcattacttcaggtgcactgctggcaagacccggcaaatcatgatgttccgcaatccagtaccgcgtgtacccgaatgactcgcctgcacgggccagctccatcgcgttgtacagggcgtctttcgctgtctggccggttgaaatgggcgcctggtctaaaatactgagtttcacgctttgttctctccttctttcacttccagcaatgctaaatggtagtcgccgacccggcctttttcatacagattcgtaatggaagtggagtattcccggatcgcccctttaaaagcaagcccctgttcaggtacttccacatcgaatttttcctgatacagtaaggtggcaatatcatggtaatcttcgcttgttaccttgaagtccgccacgatctgcttcagcccctgtacgtcctcttcccgataacgttccacatcaatcttccgtttgtttaatacgatataggataccaaaacaacacctgctttctcctttgtctcttttcagtctacatgcacggctgcaccaagtacaggagagaggcttgcccgtgcggccggtgtaggtcaacaaaccactccgcttgaaacgcatttacttcaagggcattttggctgctttccaaaacaaaccggccaaatcaagcatcaatcggagaccttgagaaactgctccccttccagttgttttgcccagcgcctgaactcgctatgattgataaagtaaatattatggcttttttgcttggtttccgtgatgagcttgcaatttttcaaaatgttcaagtgcctggaaatcgtggcagggtttaggtctaatttttcggccatctcctgggctttgaccccttcctttcttgcaatcaaagataaaatacggatacgcatcggctctgataacgctttgccaaaaaaggagatttcatccaaggtggccggtgtgccgttgttttcggatggggaagacgtggtcaatggccggcccaaataggatgtaagatcataaacgagatttaattcgccccatccccaaattaggataaactttggtgaaacagagtaagaagggaaaaagcgaaccacttttgtttgcttattttcaggaaattgttcaggaatcgtttttcccttcagcagccttcttacttatataagttggtactgattgagtagacatctgaccgttaatagattgaataccaggatctactgcaagagatgaagcttgagcttgagttgcctgactttgttgtactacaggagatgtggtttcactcggtttctcagcagcaaatgctgcggatcctgaaaagatacttgaagtaccacaacaaattctaccataaaataatattattggtacatattttttgatattttagatatatattactatttattcccctgtaaaaaagtccttccccgccaaaatccccctttcctcttactcccccaaggctccaaccgcattttgatgaccgctggcaatgttaaaaagttggttcccaaaacgcctgatttttaccagaaattaggttgctgggttgttcagcatagtctggaaatgtcaaaaagttcttccctgattagagaaaaaatattggagaaatggcggaactgagctggctgggaaccacatgaaaaaggactgagaatcgcccaattccatacagtggggcttctaacgctataggattagagaacgccagaacccttgcgggacaaaggattgggccgctgtacaaaagaaaaactggacccgttttggatccagcctgagtttgtctttctattgaattagggttgaaaatggcccggaaaacaaccatatttgcctgctgaattggcctggtctcctgccggtcaggtaccaacgatttaacagcgggtcccaacttttttgcaggggacggactttttaacagggagatacaaggcctaatccaaagaagccgggccaataaaatcgccttattttaccttgtatcatccctttaatcaatcatttgattaaacaaaaagcccaggaaaaccagtcattctggctttcccgggctttttgtggtttattcgactgtgaccgatttggccaaatttctcggcttgtcgacgtcgcagccgcgatgcagcgctgcgtaataagcaagcaactgcaatggtacaacagagataagaggtgtcagtaattcgtgtacacgaggaatgacgaaacggtcgccttcctcattcaggcctttcatcgagatcacgcaagggttggccccgcgggtgacaacttccttgacattgccgcggatgctccagttgacgtctttttgcgtagcaagcgcgacaaccggtgtgccgtcctcaatcagggcaattgtgccgtgtttgagttcgccccctgcaaaaccttccgcttggatataagagatctccttcagcttcagtgcgccttcaaggcagacaaagtagtctatcgaacggccgatgaagaagcaattgcgggtgaccgtcaagtagtcatatgccatttgttcaatttcttcttttgatccgcacagcccttccatcgcatttgccacaaggccgagttcatgtaccaggtcgaagtcttcgctgaaaccgcgtgattttgccgctacatcagcaaggatcgcaaggacggcaatttgcgccgtatatgcctttgtcgaagcaaccgcaatttccggtcctgcatgaagcaatagggtataatccgcttcacgggacaacgtcgagcccggcacattggtcatcgtcagcgtcttgtaacccaattctttcacttttacaagcacagcacggctgtcggctgtctccccactttgcgaaataaaaatgaacagcggtttttctgacaaaagcggcatattgtaaacaaactcactggatacatggacctcaaccggaatttttgccagcttctcaatgagctgcttgccaacaaggccggcatggtagctcgtgccgcatgcgataatataaagccggtcagctccggttacggcatcgataatttggctgtcaatagacaatttgccgttgatatcttggtaagcctggataattttccgcatcacgagtggctgctcatcgatttctttcagcatataatgcgggtacgtacccttctctatgtcgcttgcatcaatttccgctttatacggttggcgggtgatcgtttcaccggcaagattctgaatggtgacttgcccgcgggtaaggaggaccagttcgccatctaccagttcgataaactggtcggtcacttgcagcattgccatcgcatcgctcgctaccacattaaaaccgttgccgacgcctaccaaaagcgggcttttattttttgccgcataaatcgtattgccgtctttttcgtccaagagggcaagcgcataagaaccccttaaaagcgacagcgttttccggaacgcttccgccgtttcaagaccttctgaagcaaatttttctaccagttgcacgataatttccgtatctgtatcactttttaaaggaacatccgtgagatactctttttgcaaaagcgtgtagttttcgatcacgccgttatgcacaagcgtaaaacggccggatgcactttggtgcgggtgggcattttctctgctcggaaccccgtgggttgcccagcgtgtatggccgatgccgatcgttgccgcaattcgcatatccacgatccggcgcaaatcttcaatccgtcccttttctttaaaaacatgcacgccggcttcattccggagagcgatccctgcagaatcgtagcctctatattccagcttctccaagccttttaacaaaatttccttcgcatcttcagtaccgatatagccaacaataccacacattcgttcttcctcctcggatcacaagggggcaagaactaccgggagcagtcctgtccccttatctcttgaaattttttgtaaaacttctgatccgttttctcttcccacatgcttttccctttgtccagcgggtcaccccgccgatttgtggaaaaacatacggctgtgtgtggcagccgggaggcatccgccgaaagctcgatactcctcctcctcgtcaactgggtcaatccgtcccgaacccagttctggcgcttttagaaaaaagtcttaaacgatcctccttttctgtaaagtgaagagaaaacaacatcattatcatagcgtatgcgttatacttcgtcaacatattttaccattctcaacataaaatatgcataagagggttgttgcgttcccccttatgcaccgaaaaaatcaatcgttgaaattattctcttaaacccatttccgcttccactgccccggcaatccgggaaacaaaccggctgcagtcttccgccgtctgtgcttccaccatgacacgcacaagcggctctgttccggaagggcggacaaggacacgcccgttcccggccatttctctttctacctcgtcaatcaccgattttattttttcgttttctaaaacatggtatttatcggttaccttaacattcacgagtttctgcgggtactttttcatttccgcagccagttcggaaagcggcttgttcgcgatcttcatgatgttgatcagctgcagcccggttaaaaggccgtcaccggtcgtgttatggtcaaggaaaataatatggcccgactgctcgccgcccaaattaaagccgtttgctttcatttcttcgacaacgtaccggtcgccgacagccgtttgaacactgttgatgccaagcgcttcaaggcccttatggaagccgagattgctcattacagtagaaacgacggtatttttctttaaaagcccttcttgttttaagtatttggcacaaatatacataatctggtccccgtctatgatctggcctttttcatcaacagcgatcaaccggtcgccgtcgccgtcaaatgcaagcccgacattcgcgcctttttcctggacgaaagcagcaagcgcttccggatgcgtggacccgaccccgtcattgatattcagaccgttcggggatgcccccattgtcgagacatctgcatcaagatcggcaaaaagatatgtcgccagcgaagaagtcgaaccgttggcacagtcaagcgccacatgaataccggtaaattcttcatccactgtctgttttaagaactgcaagtatttctggctaccttcaaagtagtcgctgacaatgccgagatctttcccgaccggccgcggcaggtcatccgtgtcttgattgagcagttcttcgatttccgcttcctcgtcatccgacagtttaaaaccgtcggggccgaaaaacttaatgccgttatcttccaccgggttatgcgaggccgaaatcatgacgccggcctgcgcccccaatgcttttgtcaaataagcaacccccggcgtggtaatcacgccaagccgcattgcttccgccccgatggacagaagcccggcaacaagcgccccctcaagcatctgcccggaaatgcgcgtatcgcggccaatcagaactttcggccgctcattcgcatgcttggtcaaaacatatccgccgaaacgtcccagtttaaaagcaagttcaggtgtgagttcagaatttgctatgcctcttactccgtctgtaccaaaaaatttcgtcatcaggtttcgctccttcttttccgcatatcagttctgttattctgtcttttgtgcttcgtcacttatgcgtattttcgccttttcaccggaaagcctccacgttatatttttcgggcccgatacaatatagcttacttcgtggtctccctccttcaggccggacagattgatcgagacattaaagtcagaggcggaaatcttgtccaaatcgctctttttcccgtctgcaatgatatcaatcgttccgttcttcggagaaaggaaatccatttgatagccggcagccagccctttttccttaatcggaatattgctcagtgttttctcatcttcatcttttttttcttccactttaatggtcgctgtgaccatttccggatccaccttattgatgccgtccggaagggaaattggaacatcaatggtcgtatctttcgtaattttgctgatgtcgatgttaaccggcagcgcctcaatcccggcaaggcgggcactggtgccgtagatggtcacctttttcggatttgtcgtgatgctttttatcgtcaaattgtcacggttactgccaaccgggttaatggaaatcgggacggttttgctcggattagtcacattcaccgtgacattcactttatccgggttgaccgagacatccagtttatttaaattccggtcgaggacatttactgtcgcggccctcgtaaaactttccgtaatcggcttgctgatttccactggcgcttttacatagctgatcctgtcaatgacgtttttcgccccggtaattttcactgtacttggctccacagcagacacagatgcttcatacccggttgccagcaaagctttgtcgtattctgcctcaacgttgaaaattttggatactttttcttgtaccgatacggtagcatacgtacggctgagtttgtatttcagtttatcggaaagattttttactttcaatttggctttttgcctgccgatttttgcattgcttaaatccatgtaaacggtgaaatcccttgaggctttcacctgctgaacgatgactttcgggccggttacagtcacgtccaccgttttcggtgcgcctgatacaacaaggtttttgttgtcataaatcagctggaccggcatattttcaaccacgccgctgctgttttttgtggcggaacggataattttattgccttcaccgttttccaccgcaactgaaatataaagcaggatggctaaaacaagcgccagcaccctcataaaccaacgattgtccattagtttatccatgttttctcaccctccagttccatttcgacgaggaaggctcctttgttttctgggtatagttcagttcggcttccagcatttcctgcaattgctccaggcttaaatccctgtgaagctcgccatttttcgtgaccgtgatcccgcccgtctcttcggatacaaccaccgtcaaacagtctgttacctcactgatcccgaccgcggccctgtgccttgtccccagttccttcgaaataaacgggctctcggaaagcggcaaatagcaagctgcggccgccactttccgcttctggattatgacggcgccgtcatgaagcggagtgttcggaataaagatgttaatcaaaagttcagccgatacaacagaatcaagcgggataccggtttcgatataatcgcctaatcctgttccgcgctcaatcgagatcagggcgccgattctgcgtttcgccatatagctggtcgccttgacgatcgcttcaacgaggtgggcctgctcatcttcttcctggccgttcgttcttgaaaagaattttcccctgccgagttgctcaagggcccgccgcaactccggctggaagataataattacgaccagaaatccgtatgtaagtgcctggtccatcatccatgccagcgcctgcagcccgagcaagctgctaaggctcctgacgatgatgatcacaaaaatgcctttcaaaagctggaccgcttttgttccgcggatcaccatcaataatttatagatgacaaaccagacgaccaatatatccacaattttggagagatagttccagatggggaaatcagcaatatgcatgaccctgcctccattaattcatcaatcttcatatcctctgtcttcaactgttctattatatcatttcccgcggcgaaatagcagcttttctatacctgagctttttgcgatgttaannnnnnnnnnnnnnnnnnnnnnnnnnnnnnnnnnnnnnnnnnnnnnnnnnnnnnnnnnnnnnnnnnnnnnnnnnnnnnnnnnnnnnnnnnnnnnnnnnnnccacaccttgggaaggtgttaggcaatttaggaactcgatggaaatgaatcgaaaaccattggtataagtggattttaaaaattagttatctgattttatggggagtaaaatggtcaacaatgatgaatttcgtcaacaattcgtcaacaactcaaaagatgacagccagccagctgtattgagtagaaaaaagagcaggtgaaagcctgctcttttttgcaggcatttacatatttttttcaaaaacccattgcatatccaaaattctcatataaaatattcacgaagggagatgtgcagatgaaaaattttaggtttaaagtcttagttgcgctcgctttattgctgtctttggtagcgttgccacaaagcccggacgcggcaacaaagaaaatgtatgtccactacataaacgttggacagggtgactcgatttatattaaggcaccaaacggagaggacatcataattgatggcggccgtgacggaaacaaagtagtatcatatttaaaacggcaacatgtcggtgacattgaagtgatgatcgcgacacatccagatgccgatcacatcggcggattggacgaggtcttaaaagcatacaaagtcaaatctttttatgctccaaaagtgtccaacagcacccaagcttatgctaatttgctgagagccgttaaaaatgagggattaaaggcaaaaactgctgctaagggtgtgagcttatccgtaaaaggtgtttctgccaagtttgccggaccggttaaaaaatatagcgatctaaacgacaacagcgctgttttacggcttcaatataataagaaagcatttctgtttaccggtgacgccgaatttaaggccgagtcagacatgattaaatcgagacaatatatacggtccgatgtgctgaaagttggtcatcacggtgctaaaacatccacgagtaccgcttttttacgagctgttaaacctgcctatgctgttatcagtgtcggcaaaggaaacagctacggccaccctactgcagatacacttaatcgcttaaaagctgcaaaagtaaaggtttttcgtacagacaaacaaggcacgatcgttgcaaacacagatggcaaaaatttaagctttaatacaaagcctgttagcacacctactaccagctcaacggcaaaagcatcctacaaattgtccgcatcattgagcaatactaggccaaaacaatacagcacgatttatctaacggtccgagggctgcccaacggcacaaagtataaagcagtttgccactataagtcaaaaaatacgacatacaatgggaaagtcggctcgaaactccctattaaaatatgccgggcagcaaagggatataaagtaaaagtggatgtcttggcaagttacaaaggcaaaacatacaaaacacaaacgtcttttacgccgaggtgagggcaatgaaacggtatattattgatcattttgagggcgaaaaatttgcagtttgtgaagatgagagcctgaaactggtggacatcgaaagaagcaagcttcctaagagtgccaaagagggcgatgcgctgatttatgaaaacggcgaatatcgaattgacaaaaagcgcactgatgaaatgaagagagaaatcgaaaaaatgatggatgatgtgtgggaagattaaggcttccccttccccatccagaaacttcgtaaaaaaggagcaggcaaagccctgctctatttttttgcaggcataatataggggggtattttttacaaatacatggacaattggaatgcctgctaacgaaattataagaaaattggcttattttgtctatatccctgaaaaaattttttattttttgcttaaaaccctttacatctatgttatctatggtataatagaaacataaggaggagataagcaatgcatattaacattaaaaagcaatgcgaagaagcacttaaaaaatgggaagatgaatactggttcgtcggtatcagatttgaggataaagaaagagaaatcggcgagatttgcgaatgcagcaagcacaacctcgaccgtgaagatgagagagaatttccggagtatggaacacctgaatatgacgagctcccagagcttgacggtaccagcgcctggaaccttgaaacatatcgggattttgaaggaccctttgttacatggcactgttacatagtcgggggcaaccaaatcgcaaatcaagatgatggacttgatgataacgagattgtgataaaaaatgcggtagtgctcgaaaaaatcttttgataggtggtctaaatgatcaccttattttttttaaaaaaaagtgctaataactattgctttctatgctgtctatggtataataaatttgtaagggaaattagaggaggaatcaaggatgaacagcttatcgatgaaggtactcatgaacaacgcttggaaaattgctcgtaatggtgtgaaacgttttggcggtagggctactgattacatcgctgaagcaatgaaaatcgcgtggaaattgtacaaagaattgaaagctaaaaaaggtggccgcatcgctgctattgctccttggttcatccgcaaaacttttggccatgaaagcatggtgcaacaaattggggtatctacttacaacgtaaaaaaagaaacagcgaaagcatacctgattgaagccgttgcccacgaaggcgggattaatattgtgaataccttttgggctccgaaatccgtttgcatctgaggtgagggaatgaagaggaacgatgtcgatttaaccggtcggacattttacgacctcaatgtaaaatgccggcacactgaaaagctgtacaatgagaccacctgggtgtgtgagtgcgtttgtggaaatattacatatgccaccacaagccagctgttacacggtaaaaagaaatcctgcgggtgtcgccgtaaaaagacacctcctaatgcactggacttaaccgggaaaaagattggtaaattaactgttatcaaaagaagtggtactaacaaaaatggaagtgcgctttggctttgtcagtgtgagtgcgggaacacaatagaaacaagtgcaacgacattacgccgcggtaaggcgatgtcttgcggcaaatgcataaaaaatgatcaaattaaacatgctcgtgaggatctcatgacaaataaaacgattgacggtgtgcaagtccccctattgacaaaaaaagtgcgcagtgacagcgtatctggacataagggcgtacatagacgggtacgcaatggcaaagaaaaatttgaggtgaccattacggtaaaaggaaaaagaaaatatattggcacatatagcaagctttatgatgccataaaagcccgaaaggacgcagaaaaagaatactttgaaccctatattaaggcattaaaagaaagagaaaaggagcaaaaataatggagaaacagcgcgtgaacatggatattaacaaagagctatggaaaaaagtcggaataagggccatcgaactaaacttacaaaagaaggaaattgttgaattggcacttgaaaaatttttacaggagggaaataaaatggcaaaagttttttacgaagacattttggttggggaagtacttacaaaccgcagcctgaccgtggaagaagcgctggaagcgatcggatttgatgaagcaaagtttatcgaggaacaaggctttgacgacatcgattataacgactttagactggagtagtattgatttatccgggagaggcaaccctcccctattaaaataaaacttgggagtgattagaaatgaaaatcatcttaacaacacttaatggcgaacgtatcgtcacgaccgaagacaaaaactaccgcgcgcaatatcttagggttgaagaagcgtttgcagatggtcttactttacaacaagctgtcgatgaatttgacgggttctgcgatgattgggtaccggttgatggtgaaattggttggggcgctacgatcgagacagcggaagcgccacacattaatttgatcaatgagaatgataatctgtaaaaggaatggtacttaatgccaaaaaaatatgatcttaaaggaaaaaagttttaccggttaaaagttatagcagatgccggaagtgatgataaccacaggttatggttatgtaaatgcgattgtgggaacatgataacggtgaaaggaagttatcttttgtccggggaggtgagaagctgcggatgtttaaaagcagaacaagaccataagaatttgcgcgaacagtacgataataaaagagttaacggcgtggtaatgccgttgtttacagacaagcctagaaaaacaagttccaccggatttagaggagtttataaatactatacgagaaaatctaggcaattgcggtacaaagcctggataactgtaaacggaaagaaatattataaaggcggatttaaaacacccgaagaagcttattacaacggaagattaatgctagaagaaaagtacctacccaaaaaatccgaaaacgaaaaagataattaaactaaaaacaggccctcgcaaacgcgagggcttttcttatgcagcaacgtcctggtgtaaatgaagtttaccctggatcccggttaattattcgccagcgctgctttcaattcttccagcgtcatgtctccgactttcagagacccttcagtcattgaatttgctgtaatttctccatctccggaaacaaccgttccattttcttgcccttcttctgtggctgcttcttcctctgcagcctgttcttccacaggttctttcgccggcacatccgcaaatgtagccaattctttgttaagatcagccaccgccgcctcgatcagcgccttgatgtcgtccggttcaaggttaattttgaacaattgatatgcctttttcgcgagatactgagacgcggcccggtacttttccccgccttgtcccggttccggcagcagctgttccgcatattttaccgcgcggatggcgatcccttccaggtgcttggactgtacaaattttttcgcgtattttccgacgtaagccaacaccgccggaattgccgccagaatgattgcatagataccttggataataatgtgtaacatgttgtttcctccttattttacgcggattttttttcctacatagattgtgtatttgctatcaagcttgttccagcttttgatttgttttaacgtcgagccatattttttagccagcgcaccaactgtgtctccccgtaccaccttatggtagacaggtttcggcgccgccttttttaccgcctttgtagcagattgcgattttgttagatacttagccgatacatatacggccttatcattggatttaatttttgcccaacctgcagaaatgcccagcacctgcaccctgtcgccgtggctgagctgccccaaaatttcacctcccggactcttacggatgttgagtttgctagctgttacataataaggtgttgtttttacagcccgctttaccgtggttgccaccttagctgtgggcgccgccttttttacctcggcctgcaatgtggacggataatctgggcctgtctcgtttatgtccacataggcggagatccccggcaccttcccgctctgcgatttttgccatagataatagctgtgcacaccgattggactggatgcgtatcgggcgtaccacaacgggataccgggatgatggccttttaaatttgagagataaaaataacccatgctatagagcatgagcctatgaccggtaagctttttcaactctgaaaaaaacgcctgcatggacgcgaccagctggctgccggcatggttggtctcaagatccagcaccaacggttcatccatgtacttcaggtagcctttcacaacattgtaaaaaaatcgcgcttcctgccgtgctaccgccgggctcgtaaagcgggcaaaatggtaggcgcccaccttaaacccggcagattttgcggcttttacattggcgataaatttgggatccttgaacgtcttgccctctgtggcctttaccatggcaatacggtagccggcatcatgtgcccttttaaaatttacattgccgctgccatggtaaatatcaaaccctttcacattgttcactccctcacattaaaaacttttgcacaaggctaataacggcataaattaagcccccgccgccaaaaagggcaagggctaagtcccattttttatagctgttatttcgctttatgttcagtgtgtgctccagcagcctatttaaaatctcctgctgttcttctcgctgatcggcgttttggctgatcaatgtgctatggttgtctacggtattttttattgtgtctacataggatttatccgcctttaaagcaatatcactggcattttggcttatggcggtttccgctttatccacgcgccctgttagggtgtttacggtcgtagcgctcgctttttggctcaatgtattattaatatttgtaatgtcggttgtataggttgtagtgcttactgcgccgatctggcttgcttgtgtcggagacaaatcaacccacgctgtaccattccatctccgcataatttgcggtgttttggatgtatctatccacaactgatctgttgctggattggatggcgccacgttggattttataatagacttttcgcgcgtattggcattggcgttggcggcgtttgccttattaattgcatcctgcgcattagacatcgccgtctgtgcgtttgtttttgctgtgcttgcttgtgtcgccgcatcggacgctacctgtttggctgtgtttgctgtgtcagttgcattatttgccgccgtaagggcagcctgtgctttatcaaacccatcttgggctgtatcaatagcgttttgtgcgtttttaattgcctggttggctgtatctactgcattgttggcctgtgtaacggcatccgccgcgtcagtctgtgctgtatttgctgcctgttgtgctgcttcagctgcctttgctgcggaatctccgacttgtgccgcttgttgcgcaacttgctgcgcagtctgtccgactgcttcggcgttggtagcagctgcctgagcatcctcggcggcggcttgtgcggattgtgcggcctggtctgccgcggatacatctgcatctacaacaagttgccactggataccgtcaaaccggtatgtgcgggtatattcgccgtccacaaccttaaaccatacgtcatctttgtttgcatccgccggctcgtccgggccgtaaaagattttgtttttaccattggcggctgtaatcgccgtatttgccgcttgtatcgcctgctggatgccctgggcaaccgtggacgttgcgccgttaactgcgtccgttagccgcgtctggatacttccggcggtcactttcgcgttcttttcgttcaatatgtcgtattcgatttttgtggcttccgctgtaacatccacgcccattttttcgttccggacggttattgtgtctcccatcccgataagttccagggcggcaacgtcttcatattcttccgtcgcccacaaaggttcaaattcgacttctagcgtcaccgttggtttatcgtgggcgccgctattaaaatagtttttgtatgcggcatacaggcttgcctggtctgttacgtcctcgtcttcgcttgcatcaatcggcaggatgcggataaacgggtagttattaattaacgggctgtcgataaatttgcccggaatagtaataaccgtcccgtcttccagcactttaaacggaaaaatccgcgtcacaacctcggacgtatcaaattttgcttccagccctgttaaatttttcttgtatgcaaccagcacgccgttatcggatccgcggtgtgcatgcaaaataaggcggaagttatcgcgttcgatttccccaccccagttatcaattatggagccgtcaataccgccgatcatttgtaacggattggtcctgtacagttttgtgctggataccgtggctgtgtttgtgctggcaattgtaaattttgtcggatacgccaaattattctggatggcttccatggccgccgccgcagtaacgttgttcagctccagcttttcgacaaaatttccggccaggtcataggtgatatgctgggcggaaattttgagattatcattttcctgacttttgtttaccgtgtaaatgcggaatagttgcgggtcctgcttgtcatttgcttttgccttaatgatcatatcgttctcgattacgtccgcaaactggccgtctgaatcgtattcaatttccaattcgaaaataccatttcgctcttctgtcgccgtggcagaaatgcaatccgatagcacgccaatcccgttgtggaggaaattcgtttcatttttttcatataaaattggaaacattaaatccacctccacctcggatcaatttctaatttgcttatggcaccatcaaagctgattttcgtttgcccgtgcggaagaacagggaagttgccaaccatgtggctattcaggttggtaatcaatccattctcgacgcggtaagcgttcatcagggctgtatcaatttcgatggtgccgtttatgttcgttattgctatcatctggccgcccacataaatattgccgttcccggccacgtaagcctttatgtagggctcggattcatagccggggttgtttagggttgtggcggccgtaatggtctgtgtgctcgtttcctggtaagcaaacgggtccagcgtaaaagttacttcaaactggccgtattcctccacatcattatctgcatcatctatcacaaggcttttaatcttgtaatagatgccgggatcatcatcaaagctcaactttttggcattaaaaaaagcaagtttcgcggtacgaaaggcttgcttaaacccgttatcatccaaaaaattaaaagtaagtttgtattctatatccttaaatgcgtattttttcgtcagcgatccatgacggccacggatttctttatgctccacgtcttgctccggcgtggggattggtggccgatcagccaggcttaaattgtattttgcaatgctcacattatccaaattaaccacctgcaccaccccatgccgctgcacgtctattgccgatgccgcccataacttcatccactttttcggcgatcttgtcgatgtccttatcatcgcgaacggtattgtacataataatttgattgttattggttacgttctgcgccatttgcgactgggccacctgcggcaaagtagaaagcatccggttggccacggcatccgcgaatggatccatagcatggccaacgagtggcagggctgcttcttttccggcttcaccgatcccgatcacgcttgcttcatcgaaaataccgccgtgtttgtaccagctaaccgacaaatgcggaacacttggcggcttaaggctaaaatgtccggataagtggaaatgcggcattggtggcaagctaattcttgggatccgcaaatgcatgtttgcaaaaaatcctttaatagagctaactattctacttacagtattttttgcggaattaatcggtcccgtgatagccgattttacccggttccaggcgctcgaagtcgcagaatgaatactgttccaaacactcgaaaccctagaccggatccagtttaacggagtagaaacagcagatttaatagagctccacactctgctgataacgcccttaatactattccagacactggatgttatggatttaacgctattccacacgctggaaatattagattttacgttattgatgtatgttgaaataaatgacttgatcgctttccagacggctgtaataaccgattttatgccattccacgcgctggaggtaatggacttgatagagttccacactgtcgacattgtggatttaacagcgtttgccgcactttgtacgaccgatttaattccactccaaactttggaaatacccgatttgatagaattccatacgttggagcttatattttttacggcgttccacacggtgctaaaaaagtttttgatcgggttaaatataatttttgccgccaatacgatagcattccagatagttgtaaaaaacgtttttaaattattccaaacgctgctcgcaacgtttttgatctctccccacagggacgaaaaaaacgcggctaccggctgccagataggcgccgtaagggcaacaattattctccaggccgctattaaaagggaggaaataacagtccatgcggcgctgattacttctttaactagcaaaaatacaaatgtaaaaacgttaacgagtccttgccatattgtagaggcaatgttaacaatcccctgccaaagtccgcctaaccacgaggatatagcgccccagacgttttctgttacggcttttacactgccccagtttttggcgatcaatccaacaatagcgccgataggtcctaacaacgcgcctaccaagacaggccaccagttaactaaaaactgtttaatcgcattccaaacggttaccgttatgttcttgatgccctgccatacgccgccgatccaattagcaaatccgctaattacaccttttagccatccccagatggcgccccagttttttattactaaaataatgccgattatggctgcgacgaccgccgcaatgacgcccaaaaatggcaaaaacgcaacgctcatactacctatcgttagggttaacgtgccgcctaccacgctaaacgcaccggcaacggcggtaattacgccgataatgctaccgatcgacgatattaaggtgccgataataacaataacaggcccaaacactgcggctatggccgcaatcgctgctattgtctttttcgtgccgctgcttaaaccggcgaaccaatggatcaggtcttttattttttggatgacaggtataatggatggaagcacttcttcaccaaattcaacggccaaaccatgcagcgcctctttcagctgcttgaattggttttgtggcgtgtgtttcatttggtttgccatccttttaacggacccggaagaattatctgcttcttttgccaaatcacttaattctttgctgccgtggttgactaggatgttccaggacgctaaggattctttcccgaataatgttgctagtgcttgttctttttgcttcgccgtccacccggctgttcccttttcgatctgcgcgataatatccggcagcggcttcatcttcccgtttgcgtcaaaaacggataagcccatggaatccatagcatttttcatctgcttagtcgggctaaccaggttaaccattccggacttcaaagccgttgccgccgtggatgcgtctaccccgttactttccagctcaccgatggccgcggcggtaacggataaaggctggttcaatgagtgcgccgtcgcgccgacaacagaaaaggcttcacctaaaccggtaaaacttgtttttgtcgcattagcaaccgcggcgaatttatcctgcaccacggccgcgttttttatgttttgggatgcgtcgtttgttttaagaccgtacgattccagcgcggacgtcgaggcgtttgttacgtcttccagcttttcgtttgcgccgatagatgcttcaatagacccgcgcatgatggcctgggcctcttttacggaatagccgtttttaacgagctccaatatcccctcgttgatggtatccgttgatacgccaaattcctgcgaccaatctaacgagtttttagagacctcgcccattgttttatccagctgtttaacggacatgctgccgttatttaattcctttcggatatcggcgatttggtgttcaaaggatgtcgccgacttaaccgcaagagcaaaaccgccaacaataggggttgatattttcatggtcgcgttactgccgacatctcttagatcactgcctactgttttaagcttgttacttaagtcgccggcgcgggatatagcttctctgaatggcgtacctactttaccggctaaagcgctagattcctgcgctaggttttgttccgctctttgggcgtccagtaatttaccttccagctctttaacttctctgctattctcgccgaaagctgcttttgcttggtttagctggtcttctaggttctttgtttcttttgctgctgcttgttgtgccgcctgcagataggcgtatcttagcttcgccttatccgtttcacttgcatttctggacaaggcgcctttttctagttcgtattgtttttctaggttttgggatgctaattttagtttttcttcttcgccttgcaattgtgccagagattgctttgctctggcagcttcgctggctctttctgcttcggctcgtttttctttttctaattcttgcgttgtttttgtgatcttgtttgctaattgttgttctgcaatttgggcgctgcgcagcttggtttccatttttcctgcttccgtcgagttttcgccaaactgccgcttaaccgcctctaattgccgcgctgttgcctctgttttctgcctggcaacttcatactgcttctgcaggttatttaataccgacgccagtttttcagatgcggacccgctcagtttcagctgttcttgctctagtttcagttcttgccggagctttttggcggacgattccatttgggacatggcttcgttaaaatctcggttaaaaactttaaacgttacctttacttccctgttatttcctgccacttttcgctctcctttcttcctggtatgtaagccaattctcatatgcggctttgttttcggcgatcaaatggacggatgagagaggtaaacgccaaaagtcagctgccggaattccgcaaacaaaaacgtagagggtatataaatcctctacgttctcaatttcgatgtttggcagttttacttttttccagttgacgcccctgttttagcataaaatcctttttgaaattgttttttcgcttttttagaaatgaccgcaaaataaatagccaagtcgttttcgatgtctaattcataggactccaggaaggcgtcaaattttaaatagtcttccttgtttgcctgcctgtaagccgcgtaaatagcttgtaaaactgaaataggatcaaggtcaatatcctctttcataaatccctttagaaagttaccattaatgacgccttctttttgcagtttaaaaagggtcagagcgttgacattgatgtcaacttccctcgttgtcccgtcggtcattgtgatctccatttacctttcctcctttcccctactcccaaactagcccgatttggttactcgttacgttaacgctagcaaggttttggggtgcgttagggcgtggatagtttaactagatcatagttaaagtccgttttccatttagttgcaagagttgaatcttcaagttcgtcaacgattgcctcgtaatagcattttttgttatcgtcgaccatggccgtaaattctagctccagctcggccacttcatccgcgccgttttctacagacaggagcagccccgtagatgatacgcaattcggaaatgcgatcaactttgttacttcctcaaattcgtcgatcacgtccgcagttagcgtaaattctctccctttactatcggacccgtacgcataaactcctggctgcaaattatcgttagataagccaaaaattttacgcagcgggtcaatgagcacatgcgcatttagcttcagggtcattttctgcggcgttgattttcgtttagtttcgatcccctcttttttcagcacaatttccagcagttccgtttcgccgtcgattttgccgatggcgccaaattcctgcgccgtcgtatcgcctttaaatttaattgtcgggtttttaatacttaccggatcaaattcagtaataacctttgccatactttcatcctcctaacgttttattaatttcattttctactgcactcgttaaatcgtttataatcggctggcgcgccttctctaaaccgccccgcataaattcttttggtgggttgcgtttagatgtcccgatacccaaatcaggatatttaatgtattcaaattgctttttgggtcgtatggtaaattccaggtttccgtgtttcacgtttaaggctttgctatctcgcgcatgttttttatttaatacgcggcctttccaagtagaaaccggaatgccttcttgtattttctgcatggccaagggggagcctttaatttttagcgtttcgtttatcactttttcggatcgattcgggatttgttccacctttttgatcagattgtccacatctgtaaaatcaatatcccaattagacgccatatttcagactcctggtaaagttaaattcgatttcgtccacgtaggcatcttcctggcctttctggacgcttcctttgctgctggatataaaactatacccggacgactccaaagccgaaatcacgtcaatctggagcccgtcgaggtcatccatgttttcagcgtagagacgcacaaggacatcctggacaagtgtaaaattcttttcttccgcccggcgcattccacctgtctcaaagattacaaaatggtagatgccgccgagatcatcttttaactcatcttcgctcacactatcctggtaaactttaaaattaagattctcgagcgcctgaatcagcgcggaatctaattttttcagccgcgcctttgctacatcattcatttttatcaccgccatcgactttgtgaaggtagaaatatagatagttagcgtcgcgatccaccgtaatgatgttaaaatcgtcgccatcaatccggacaatcagtttatctttatcgatcttgcggagtgccggcggcattggtgtttttacttttaggtctagggtggagcccatggcaccgaattgcagataatcgctttcgcgcacagacatttcgcgataaaaaagccggccctgttccacaaactgctttccagtaactttccggctttccgttctaatcgttttataggctccataggttagcaccccatcgttaaaggtttcccgtactcgtgctagtgccatcacctgccgcctcctctgccgcgttgtagtcgtccacagccgcccgcaggataagccggcttaactccttgctaaaattgtcctcaaagtccgaaagagcgttgttccagtcataccggcaacgctccattaataactctctttctggggatcctgctgcaaaggtgaaagtcgtatcgcataattcattcaaatattcctggccgcggacgagcagccggtttagctgccgatccgttgcctcgtcatcccacgttaccagcagccgatcttttagctcctgcaataaatcatctgccattagctttcaccggccgccgctgtaaccgtcactttacatgtcgctgttttgcccccgtctgtcgttttaaccgtaatggtcgccgttccggccgcaacaccggttaccttacctgtcttgtcaaccgttgcaatgtttgaatcactcgtttcccatgttacggctttgtttgttgcattagccggggcaacggttgcggtaagcgtttcattcgccccggctacaatgctagtttctgttttatttaaagtaacccccgttacaggtacgggtttggttgttacctgcaagacatcgctccagtccgacacacccgcggcattttttgcccttacacgataactataagtcgtgttagcggttagcccggtatccttgtaactcttttcggcgacgtcctgggctacaattttgccatctcgttcaacgtcgtacactgtcgccattgtcaatcctcctttcccctattccccatcttcccaagtcagattaattacggtttgcgcttggcttgggctagataagtttcggggcgttttagggcgcaaccttaacgccgctaatgtcaaataccaaaaatgcgttgttatcgactggcttaccatttgcatattgtttggttacgtaaacgtcctgatcttccaggatgcgcagttcttttgctacttcgattgagcgactggatccgacgcccaggaagtaatctttcgccaggcctgccaccatcttgccggtcggcacagaaacggattggatgatttttgccgggattggcaaaacaccataaacgtatgtgccgttttgcgtaaggattgtcgttgccgggaaaatttttgcccagtagtcggccgggtttacaaccagaagtacactcggcactgtccgtttcccgtcgtgcgtaagtggatacattactttttccccgagcgtcgccgggctgaggtccgtaatagccatggcctctttatccgggtatacgccatcgacaacggcgcccgcaaggtctttcatcatgccgattggcatttctttgcccgtgccgttaatcaccgcatcttccagggcaatggccatcgactctgcaagtacggtgcggacgtactggtccaaccaggtagggccgaggtccagcatagactttgcaaccggaataaaggcgctcaatttgtaaaggttggtttggatggtctcaaatccatcatcgagcaactccttgatcgcgtccgtgagtttgccccagtatgccgggttcacgtcgccgcgttttgtaatccattgcgtaatgccggttgtgtttacaaatgtaatttcattcagcaggtcatggctccgtgtcagctcatcaaagacgcgttcaataacagtcggtggaacaagttcttcaacaccggcaaagccttcatttgcgataaccgcattatagtatttggtttcctcagacgttaaaatttgcatgccgcgtttggctagcacctgctgatcgttaaactgttgggaggctgtttgtttcgcttcctgcaaaatcgtactttgaataccattcgcaaattccaccatcgcggcggcaaatgattcctcgtctcctgctcgcatagcgttcaataaattttctttttgttcagctgtttgctgttgctcatggtctaaatttttaattggcattttcgtcatctcctgtacctgtaatttgttgtgttgcttttctcaatccctcgattagtgcagccagcttatccggttgtgcacttgcggcggccggggctggggccttcctaaaccgggaaagaatactatttttaaaggcttctggatctacttcgtttgttgggttttggtctgttttttcgccttcattattcacgcggtcagccaggccaatatccacagcctcatccgcggcaaaccatgtttcgttcttcatgagcgtttcaacttcggattgttcgcctttaaaccgtgtcatgtagatgttagcgagcgacttgtcaagcccttccagactgttcagggctttttgcatatccgttttattaccccatacaccggtagacgcttcatgaatcattagcatagagccaagattcatgataatctcatccccagccatggcgataatggacgccgctgaggctgcgacaccatcaacatgcgtaattacttttgcttgatgatcgcgcagctgattaaaaatagcaatgccgtcaaatgcatctccgccataactattaatgtgaacatgtaactcctttgcctgaacatctttcaaggcgttttttacatccgtagctgttacggactcaccaccccaaaacgatgccccaatgtcgccataaatcgttaatttggtggtatcgccgtccacggcttcgcatttaaataatttttcaatagggggcaggctattaaacttctcatttttaaaccgtttaatcatgtgtcctcacctccttccacttcctgcacctggctggcgtcagtgtagtttttcgtaacataccgtttgtttgcccattcttcatcaatgcgttcgcctccgatcatctcgattagatcgtttatggagagcccgccaatcgcaaatagcttgtctgcggccgtggcaaggtccgtaatgtctgtcactttaattttggtcgtatcgatttttagataagatccgctcaaataggcctctttgccgtacatctttcggttaatttcggcgctgatcaggtccacaaggggattaatacaaaacattaaaaaattgtttgtctgctcctgtacgtccgccacgtcgccctttagcaggccgtgggggatgtggaaagctgttgccacaaggtcaaacacatcgtcaaccaaatttcgaatgtcgcggctgtcctgctgattcgcaccgtttttcccgctgccggaaaagtcgtccagttcatagcctttctgtagcataaaaatagccccggcgttatctgcttctagccaaggctcaaactgttcggtcatcatgtcatttattttttgctgcacctcattgttctgcgctctcaaaaattcaccctttaatgcaaatcgtttggcattagaccgcttataaatatcacgagctgaggaaataagcgtgccatagtccttgtaaaagctattgaccacgcgcataatatcctggtcgtttaattttaaataaatgacgtccgattcgttaaacgagccggaaaaagtaaaatctcccaccgtgatattggaataaacggattccttcatggcgtactcccgcaccgtaaaaccgtctgcaataaaaagctggtcattggccattacgattaagcattcattttctcgatatagtttactgaccattttctttttaaattccgtcgcattttcatttttgttcggcgccacattgagcaaataatagttatctgcttttgtcgctttgccgtttttaatggtcctaaactcacaccggacaagcgcgtttgcaattaaattaatacagctatcaacagccaggcgcttgtaaacttccgacgccaggaggcttacaataatgggctgtaattcctttccggtatcttttaacccccaagactttacccagtcaataaaacccacgctctcacctcctaaacgataatcggtttaataccggagccgccgctacttaaatcaagatcgccgtaatcttctagttctgcatcacgatttagagcatgcaaaaaggcgaaaaacccatccgttttccgcttttctttgtcgatttttttatattctttgttatcgttatccagaaaatccacatacacatttccgacgtaccagcgcattaatggatcgttcccgaataccagcgtatggttgataaaacagtcatccacaattggagacagacggctatgcgttacgcggccacgtcgtacaatgtccacgtcaaacccggcttcttctagttttggtccaagaatagaggcccggtagtcatccatgcaaattttcttaatgtaatatttcttcgccattttaatataccagcctacgatcttttccggcggaatagatttcccataaacaatctccgccagccctttatccacagcaagctggacaatgtctttattgatgtcctgcaactcgagcgccaaatgatggataaacgtatgttgcagccagtagcgtttgcctttgtatttcatcaggatgccgcaggaacaaaaatctcggacgtctgcaaagtccacgccgccgattgcatccatgcctttaagctgtggcgggatcggttgattcgttgccaggcggtcctcatacgtggccacctcaaagcgcggatccgagatcgggctattcatgcgttttgtcataaattcaatcttaatcgccggcttacgctgtgctaggctgaattcttttagcattttctttttcagcgttttattgtacgggagcgatggattcgcttttgcccacaaattcggatctttggcctcctccggatcatccagtttgcagataaacgggaaaaggctgatatcttcaatttcgccgtttagcaccatgcgtgcctcttcttttaggtcgtccagtgggccgccccgaacatttccgtctgtcgaaaaatgaaactcgcgatagtcctttactttaccgccgccagatgtaaaaactttgatagcgtcgtagttttcgtattcgtgttcctcgtcgaacataacgcaccccgggcgtttaccgtccttcgtcctggcgttagaggtgttatagcgcatttcgctttttgtcgcccggttaacgattagcattttagtgcgataaaatgcattttttaaacgcttctcattttccggcattgcgagcacatcatacacgtctttaaaactcgtctttgcctgaccttccgaggtcgccacgatgtcaatgtcataattcgggatgccgtgctgtttgctcagcataaaaaagctgtcatacgagaagaacccatttttgccggcgccacgccccatatagaaaaaataccggtcaaaaaccagcgtatcatcatctttccagcgcacgccgaaaataaagacgttcgcaaacttttgccacgggtaaagttcatagggaaaataccgggcaggaattttaacactgttctctaccattttttcgtcaatgtaaatgtcatctcgagacaaaacctttttcaaataagccaccagctgatgctgttctttacatgccgggattttgccggattcgatcagctggaaatattcttcgatgtacgggtgcgtttgataagtcagcacatttttatacgtcatcgccgctgtccacctccgtcggaaccggttttaatccgagatcagaaaggattttcagcatctgcccgttcgttttgttcagctcggaaatggagggattggatttcgggccgtatttgccgacgatgcggacgccgtttgtctcgatgtcgtcgatcagctggcattttacatcccacagtgccaaataatcctgtacaaggtcaaaatattggtttccgacaatttgattttctttcagctgggcgatcaggtcatgttcaatccgtttccgtaaattttcacgttttagcttggccatgtcatcccctcccttctatttccattttttggatatatacactcacgcgagatgctaagaaatattttttccgacggctccccccgcgtttcaaggtcccctcagccaacttcaatcctttgaccccggggggtatatagagattaccagcgttcaacattcacaaaaggtttctgtttattcttaagattatattcttttccatggatctcgttgtggcacttgatacagacactctcgagattgtccagcgtcagcgccaagtcaggccgcgatttaacttccttgatatggtggacattctgtgctcgcctgtacctgcctttgcgcttacatatctggcactcatagtgatctctttccagtgcttctaatctcatcttgcgccactcgcaccattggtaaaactttactagcttatcctgtctaattaatccttcaagccatcgtaattgttcctgcgttattgtcattacctttcatctcgcatggctttatctgcttcggctattgcctcgtttgctattctaatagccttctgtgcttgctcaatggtttctttcgcatgtgtgattgcggcctttgtgattgcgtcatccatttccttcacctgcccattgcatactaaaagcgcccatccacaatggacagacgcttgaggcagaccaccatgctgtttccgcagcattgtatattttgctatggtaatagcatatcacggttttttgggtttgtgtgtcacatcattgtcatatcattttgcctccgctatatttcgctatgataatagcatatcacggattttctggttcttgtgtcacatcattgtcatcacttatctgctgttcctcctgtcggcttcttgccgccaagttgcggacgtatccatacgagtaccccaattcatccgcaatttctttatatgtcttgtcttctacaaatcgcatatatgctactttgtactccaaacccgtcaagctgttaatatgctcatccatctcgctttttagctctgtataaaactccagttgcctttcaagttcatggattcttttcagcacgcggtctgtattttccgcggcaatcccgattccaaatttagcgccgcggctttcaaaaggaatgtcaccttttccaaaccaaaagtcaacatcgttttgtagcatttcaatctgtgtttcaataatgctaatcatccggcaaaggtccgcataatttttcatcaccatcatgcccctacccccgatttgatttttttgatccttgctttcaatgcatccattagctgatcttgggttcccgttttgttctcgagtgctgccacgacatcctgatccacgccgtcgacaacggtcaaatggtggataattaccttttccgtttgcccttgccgatgcaggcgtttattggcttgctggtacagctcgagactccagttaaggccgaaccagatcacatgattcccaccctgctgtaagttcagcccataggccgcgctggccggatgcgccaggagaatatcaatctgcttatggttccaatccttttcgtcttgtggcgttttaagctcccgtacccgcaagtgcgttttagctagggctttcaggatccgttccttgtcatgctggaaattgtaaaagacaagtgccggcttcccgtttaactcctcgaccagttccataaacctttcaatcttgcaatcatggatattcacaatgtttctttcgctgtcgtaaacggcgccgttgcaaagctgtagcaacttattcgtaaggaccgcggcagacccggcatcaatggtctgttcgtccacctccaaaagcatttcggtttccagtttctcgtatgcctttttcgctttactatccaggacaaccggaatcgtgttatacgtcacatccggcagttccaggtaatcatccgccttcatgcttacgcatatatctccaatcagctgctggattttctcatctgccccggtttttggcgcgtatgtaaaaacccgttcccggtttcgttggtccggctcaaaatagcgctccctgaaccccgtaattcgcttccctagcctttcgccaccgtccagcaaataaacctgtgcccatagatcaagcagcccatttggcgccggtgtaccggttaatccgacaatccgtttaatatgcggccggacgcattttaaagccttaaaacgtttcgcctggtgatttttaaaactgctaaactcatcgatcacgaccatgtcaaacggccaggcgttccggtaataatccaccagccacgggacattctcccggttgatgacatagatatctgccggcgtgtttaacgcccggatccgtttagcttgcgtccccaggcaaactgaaatccgcaacagtcgcagatgatcccacttttccgcctcatttgcccaggtgctttcggcaaccttttttggcgcgataaccaaaaccttgctcactgcaaaccggttatatttcaactcgtttatggcggttaaggtgatgaccgttttcccgagtcccatgtcaagaaacaagcccagcgctggcgtgttcaaaacccgattgatgcaatacttctggtagctatgcgggataaatttcatccttgcagcacctcgcttataaacgaatccgccccggctttggaatcgataacccggacatcacacccgaattttttcagctcgttcatttttgcgatttgaagtggccgcggttttttgcctggcgcttttaattcgacaaaatagatccggttacccgggaagacgacgattcggtcaggcaccccatcgttccccggtgattcgaatttataggcttttccgcctgctttttttacctggtcgcgcaaatagatttcgatttccttttctcgcattttttccgaacctccgttcttaatgtctactttgtctactttctcatcccatacgcgtatatatataaaattaggcggattaggcgttacacatatacgcctaatctccctaatctccctatttttatattcttatatatataaggtagacaaggtagacaaatatatataaacctagatatatcaaggggtttgcccgtctaccttggtgtctactttctcattttcaaggtagacaaggtagacattttccaaattttacaaggtagacaaaatagggagaaggtagacaaaatttgattagaaagtagacgcacattagttctatttttccctgatatagccgccttttactttcccgtatgggccgtaccggtaaggtgttttttgtttcttccacccgtccaatttttccaaaacgtcattgatggccatggtgtcgccccttttcatgttgcggatttctccgcccaaacattccacccatatttccgcggcacaaattctgtcccgttccacggtaggcgtgttcgtcccgtctcggccaaactctccagaccagtacattttccgggtgctgatgtcttttttctgccaatcctccggtactttccgttccacaaaatcgcggatcaagctttcccgcggatcctgttcgctgtgtccttcctgctgccgccttgcttcttccaatacgtccccacttaaaaacagtgtttcgcccagccgccacgccatcacggcttccgcccaaatctgatcaatttcgttttctaaatcccggaatatgcttttaaccggctgctggatgccgcagtcaatcggtaaaaaccgccggccgcctgtcggatcccgcaggtaatcgctccggttactcgtcccgaaaaatacgcaccgccgcaaatgcttttctgctttccgagcatacgcggccctgtactggtcatctgtgcggctcaaaaagcctttaatggtgtttaggtctgatttattgtaggcgctcatttcaccgatctcgacgatccagacgccttgcagcagctccgccgcctcttttccatcaaaactttccaggctgttcgaaaaccagtccttgccgattttttgaatcagggttgttttgccgatcccctgcgccccggttaaaacgggcatggtgtcgtatttaacgcccggctgcatcgctctggcgacggctgccgtcagggatttgcgagtaacggcgcgcacatatggcgtgtcttctgcgcccaggtagtcaataaaaagcgtgtccagccggcggacgccgtcccacttcaaactgtttagatagtccacaacgggattgaatcgatttttcgcggccgttagcaccagcgcgtcattgataatgtccttaattcgaaaaccaataatcttttcgatgtaattacgcagccctgcgtcatcattatccgaccaccggaaaaggcctttttctttatcccgtggcgcccacggcatcggggcaatcccaacaatggcgtcagcaaaggaatccatgcgaatgcggccgtgcaggttagcgtctccctcgagcgcgagcatggcgttttctatcgtttttaacggcttcccggtattcgggctaatgcttagcttttgaatccagctgaaatcctcttccgttgcgggcacaccttccgcaggcgtcccgaaatcttcaagtgctttttcgtagcgttctttgtttaaaatttccgccacgccggcatcatttaacgcaaaggctgacatctgcacgaaagacggcagccggttaatcggcgtatcaggttttgcctcatcgtccagatccccatatttatgcagtcgcacaaggtcaaaactgtttaccagcttcccgctgcatggatccgtggcgtggtgggaatataagaaaagaccatcctcatacacgatcgcaccgcctaccgttgaaccgtctacaaacgtcagccggtcgctgttggcagtgggcgcgtaaacgccgggtaaaaacttctcaatggcttcatagatgttgtatgtgcggcagaatgccccgacaacgccgcgcttttctaaagggtttccctgtttggccgccatccgtgtatgcgcgggggttgaccctggcacttccggccattcctggatattgcgccaatcgctgtacatggacagtatgccgtccacgtctaaaaatggcttgtccgcatagtggaaaacatactggctgtccgcgcaacagctcggccaatacatcagtctggatggttcgaaagttgtcgggtctgcaaagctgatgccgataatagacgcaagttttcgggctaacggctcgtattcgtccgccgtcgccgtccgggacaaaggggcaagcacgcgcaaccgcggcctgccttcctcgtgcttgcgcgtgctgtaaacagcaaaggcgcatcctaacccttcgagtcgtctcagcacatcctgcgtgcccccagcagggatgttgtccaaatccagcgttaccaggtcgcgcccagtcacgttggcagccttccggcggttatttttaaacgtgccgcctacgaacccgccaacgtctttcagttcgtcctgtcgcgacttgggcatttttaagtattctgcaagcgtttctgtgccccgtgaggctgttctaagcctttctaccatctccgaccagtaaatggtttgtgcgggccagtgtgtggccttacggctgttaccggatgatatggcgatctgtctatcgtactgcatgatttcacccgctctctttactgctctcgtctctctctttaccaggatgcaagccctcttgctcaaaaacttgttccgccattgccaccgccactgcggcggtatggacaagctcctcgaaaagattgccggcatctgattcttttccccagcccatatctttctgcatcgcctgggctacctcgcccacttcttcaaccaatatttttagccaatccccgtaatcgtgtcgctgcctaccccatttttcgttttgtcgcttgcgttctgattcgacagcgtcaagcgcggtgcggagtaaaaaggcgtccatgtccatcaactgtacctcccgatgagttctttgattgctgttaccattttttcgtttttcttctgcaaatcctctgcctgtgcccgcagacgcttattttcttttagggcgtattgcaggccgtccagcagctcctcgatttgcatttgctgccaatcgaaagcatcgtctgggcagtcatctagcgtctggccgtaggtttttataccggcctgcatgcggttatcgatctgccggcggattatgtccaccagcagatacgcaatggtttccggctttttattttgcacgtctgggcttgtaaggtctgacgctctaacgcgatttcttttcttccaattttgcacgtcccaaagatgcgcaccgtgtttttcggcaatttgtttgtccgtaaggccttgcgccttatagtccttgtactcatcgactgacatgtttagcattggctcctccccctcgagtaaatgcccaatttcccgcattttcttataatttccacacccggcgcaaacactgtccggcgggcggcgatttccgttgtttttcgggcagccctggcaattatccagcagcagacccgcctgtatcagcaatcgcttttgcgtttgcctgttcatttattccacccgcttgccaacgggcacagaaaaaaagtctttatagtaaggcgttagatccgccagtaacaatgatccttctgccttaccgctgcggtatttaatgaggacgccatccttgctgataatctctgctgcttcaaagcctgcaatctttttcataaactttaggtaaaatttatagttgataatcactgccccaacttttgccggcaacactttcgatggattatagaaacgaatttccgcttcaatcgattcaatccgtcttgtttcatctatagtcaaatcgcttaaccgccgatttttctgcttattccgcctttttgcttccgccttaatggcctttatcttttcttttagcagtttagtttcccgccgcatttcatcctgaacggcggaaatgtttgtgcttacaagctcgatcacgtttaccactcccttaacggcaaaataagtattaatagattttctgattcgaaaaataccggacgcattttaccaaaaaacttaacagaaatgctctcgcacccgccagccttaaaaagccgaaccgcatcccataaaaactttgcctgcagccttactttttcatcccctaatccggcggaaagctcataccttgctttcacatcgaaagtttgaaagcttagggtgtttccctcgagtaaaaggttatttgcctgtttcgggttttccgttgcctttccggtggtatataaaatgtcgattgctttatgcagatcagctgtactgatttcaaactgtcgcttgggttccgtccacattttagtcaggcgggtcacgtccggataattgccggctatcggctcgccatttggcgccagtacgatattccctttgtcgtgcccgacatctgccttgtagagccgcacagagtccgtcacataaacgctgccatcaggactatgccaaacgccttgcaaaaccgggcgcgtttccggagctgtcttcgtaacccgcggcacgtgtttcataaaagtttcatagtttattggcatatcttgtccaccgcctttatagtctaattgtgtaagggcttgtaatgatctttgtgaataagcgcgtactcttgtccgcttaccataatctttgtgggcaggcctcgctttgtctttaatatcataacgacgggccgatacttatcacccttttgtcgtgtttttggcttcacgtgtttcgcccctatctatatgacatcctgcccaatcagcctcttccgatcgatccgttctacatcaaaaacctttccgttctgccagatcaagatatcccggccaaaagattttggatcttggcattttcattctccttccggctcatttgcagatcatgatcgcactgcggcgctaatctttcataaatacaagccagtgcgttttgcttcttctgtttccaaataatggtctataatcaatagcttgcagtacttctttcaaaggcacttgatcttcgttccatttaaaaatgagtgttccatttggctttaaaacccgcatgcattcttcaaatccttgctttatatcgaattgccataattcatctaataggccgtactttttggccaaccacgaattttcgccagcctttaataaatgcggaggatcaaaaacaacaagataaaagctgttatcgtcaaaaggcatgttacggaaatcggcaatcacatctgggttaatattcaatgttcttccatcacataaaacttcgttaaactgccggttgtccatatacaacacatcttcattttctttatcaaaccaaaacattttgctgccgcaacaggcgtctaaaattctttgcaattgccttgtccctcccttttatcgcagtatagttctacttatctcttataatgatcttcatgaataagcgaatattgatgtccgcttaccataatctttgtgggcagacctcgctttactttaagcaccgtaacgacgggccgatacttatcaccctttttgcgcggcttcattttttctccctcgcgtaaaggcacgaggaaggcaggatgccttgtttaattaaatccttgtcccgtatgccgtgccgggttttccaatttttcaagcccttaacggatatttttttaatgtcagctatttcctgcaaggtcaaaccctgctttcgcaggcctatatattcttcttttgtcatttttatctgtgcccgtacggcgcctatatcggctagcaggcttaaaaacgtccggctgcttgggctcatccccaaagcttttgcgatttcgcgcttttcgacacccatattgatcaattgttttagctcgcttatccgcatatcaggacccttggctaaaatctcttttgtctctaaaatgcgttttatcatccccacgcctcctaatcctttttgtagtagtccgacacaaagccgtccgcgtttaacggcaggccaggtgcccagtcgataggctgccgcataatatcgataacttggtccaggtccgcgtactcttccggaacatcaagaacaacctcatcgtggatgtggaaaacaattttatagccggctgctgaaagccgtttcagcgtttctgccaggcagtcccgggcaatggcctggacgatgttttccaccagcttcccgccgtatgtcggcacttgttcccacttcttcgtggtctggtttaacccaaagtaatttaacgattctttgccgtaatcgtttgctgttaaaaatggctttgcgtaaaatagtttgcgctggctcggcagtgtaatggttaaaaagtctagcccgctttgcatatcgctttcccgggcaaaaatcagcccgttcacgcctgccggcatcccagttttcatgacggacagtgccgcgttctcgattttgtaccataagtccacgatccgcttattagaagaacgccacctccgtacaatgtccggcagttcatcttcggttaatcccatttttaaagcgcccatctggataagggctccggctgcaccttggtatccgagggcaagctctgcaacctttcccttttgcctaagtgcgtattccgggttgccttttttaatcaattcgataggcacaccaaacatttgggatgccgacgcttcataaatttttccgtgcgtgttgaaaacgtccagccgccattgttccccggcaagccaggcaatcacgcgcgcttcgatggcggagaagtcggcaacgacgattttatttccttcgcttggaataaaagccgtccggatcagctgggaaagcgtgtccggaacgtttccgtaaatcaatttcagcgcctcaattttacgatccctgacaagctccctggcatgcccgagcgtttcgagataattacgtggcaagttctgcacctgcacaagccgccctgcccagcgtcctgttcggttcgcgccgtaaaactgtagcagccctctcacgcggccatcctcgcaccgtgcggcagccatcgcctgatacttttttacgctggttttggatagctcctgccgaatctccagcgcgcgcttgatgtcaccgtctgtcgtctcgactaattccgcgacggttgccttttgcaggttttccacttccaacccgtggcttttcagccaccctgcgagctgcgtggcgctgttggggtttggtaacccggttagctgaaccgcttcgcgcgtcagctcgtccgtgatcgtgtcgcttatgtagagagccccgctgataagtttttcgtcgacacgaacaccataagcgttaatcagttggtccaattcccataatctctgttcactttcgggaacagggaatgaagaaagccggttttcgatctccttttcaacctccacgtcctgccggttgtagtctttgaatagttcccatttctccggctcgtggtgtggcattgtgcgcgttcggttgccgtttttagctgttggtttggttggcgtgcaaaacagcttaatgagggcttttcctgcgctcattttgcgcttgtcttgcggcaggcctagtgctttaccggttgcgtccaatcctgctgtatagccgcaataaaggccgtgaaacatggtgcagcgccactggttaatccagctttccgggcggatgtccaggaattttgaaaggctgtaccattcgaaaggtgcgttgtaagcgtgcttaatcacgttttgatccgtaagcgcggccagtacatcaggcgggatccgctccccttgtgccaggtcaataacgaccgtcggcgcgctatcaacggaataggcaaatagcaacacatcaaaatcgggggactgtacatatttgtacaggcccgccgaacgaatatcgacactgctataggtttccaagtctatgtttaggtgtttcatcccccatacactccgccgatcggttgccctgtaatcggatcgatcggggcttgttgggcttgttgctgttgggcgttgttaaacggggtgcctgcccacgggttagctgcctgttgcggctgctgaaaatccccgaaatcgtcttccgccgccggtgcagatgcaccgaagggttccccgtcgcgtgttttttgcacgtttgtgctgatatagcagccaacgccttttttgccggcaaaaacgtatgggctaaagtttaaagcaatgcgtccgtacatgccgctataaacttgtgtcgcgtccaaaatcgggttcagccccgcgtcaactactttcggcggatagtccaatccggaggttgccgtcataacccaatgccctttgcattcttcgccgtaaggcgtcccatcctgcctcacgccgtccccgtcgtggacgggtgttgcaagggtcgggggaacggcaccattccaggatccattcttgcctttttcaatcgctgcttgaatggcggtgtcaattttttgctttgttgtcgtgtcactttttggaatgagcagcgtaacgctgtatttagattcgcccccgaattggttttccctcggtttcagcaggttcacatagctaaagcgtacttccccggtcacgatacgagtgttgtaattgttgtttgccatttttacatttctccttttcctaatttccgattttgatatatctgtttttgttatgcccgatcaagtgaagtcacttgccgcgtcgggcgcgttcataatcgccggccgcttgtccgattccggcgcaatcgtcggttttccaggcgccttttcgacaagtcccgcttcctctagcaggcttttaaactccttcttcccaagctgcttttccagttttgcaacggtgagaggcacgcgctcgtaaagcagcgcctcatctatgccgttactttttagatactcaaatgcctgatcgatatctttataaatacgtgtcgaccgaccctcaaccgctttccagcctggaatttcttcaccatttaggcaggcagatagggcatattcttttagcgccttcacccatgcttccagcccttgcgcccgctctagcacctcgcccacttcttcattagtgagtaacggcggctttttcatttcaaaatcttctagcgccgtgtacattttagcgtgtgcccggcattgtgctttcgcccggcaaaacttgcaatgttcacccggcacaaactcaccttcaccggcataagctttttgggcaattggctttatttcttcgccccatgccaggaggtcatccgccgatatttcccattccgatatgttgtctattcgtggttggataatggccaggtgcacatttttgatttggtataaaaagctataggtataataggcgccgagtgcatatagcatcatttgcggattgttttcggcgcttaccggcacgcccttgccatatttaaaatccgtaatgtaaagcgtgtccccaccgataataaggcagtccaccgtgccaaaaccttccggcacaactacgctataatcaatctgcctttccactgctacatacggctgtacgtccaggccgatggtgatttcccgtagatagtccaaatacgtgtcagtatgctttagcatttcgtcctggaagagttcgtgctttttaaatttgttgagccgccgtgtatatgtgctttggctcatgggatccgtaaaatatttgcacaattttaactccgcgatttcatgcgcaagcgtaccctcgcgggcgtagtcgcttgttgtgtccgcgaattgctcctcgaggcgggcgctcggcgtgcagacaagccacctgtgcgctccgctcgcgcttagcagggcgtgttccctttccgcgtgttttatctcttttgtcggcattaaattttcgcccccagttcgcgcagtttcgttgcaaaagcgccgtattggtccttttgcagttgcgttaatgcctggatgccaaacgtttgaagaaggttgagcagttcctgctgttttccggaatccattagctgtgtggccgctaccgccagttggtccatcgtatacgttggcgcttgtgttggcacttgttgcggctgtgcctgttgcgctggttgctgtgctggctgttgtgccggttgttgcgccggttgttggcctactatagatttaaccccagccgcggatgtttcaatttttgaggaagcctgtacgcccatcagaacgccgagattagaaagcaagttttctagttttggagttacatcaatgaccaatttaatttccattgtgattaccatcctttcgtgatatgctttacctgattaatagtttttattttgtcggcttacgggagccggcttttttagtactcaatgacgccgtcccagtcaatgatttctttaataatttcagccccattcacaaatacttttttccttacgagctccgtcatcttctcaccccctttcaaggcttagaacacttttcgttcgtcttttttcgcggtctggctaaaaaggaaagccgttaaccggctaagtttggttcagtaccgtttaacaaatccagccttaacgctccgctgtgcaaatgcgagcaacaacatcttttgctgtgcagtaagacgcatccaggcaccggctttaattttcatctcggccaccttctttctcttgcaaatcgtacccaagctgtagcaacgccagcttaattccgtagatgactgcgtgctcattgccttccgcgacaaaatcaggttcgtttactctctcgagcaaacggaaaattcgttgctgtacgctgtcagataattctgggaaccgcttgtcatccttaaaaatcctgtggagctcgtatttaggcatctttctccacccccttgaatatttgataaaaatatttctgaaggaattcttccatcctgccggccaggaaacaccatttgtcaccttgcgactgtggataataaaccgggccgccattttctaaatccaaaatctttttgtattccggtcgtagtaaaattttttcctttagccatacatggctgcgaccggtgcgctctacaagatctttcatagaccaccagactttttcttctggtttcacgatgcctcaccttcctggtcacgctcgatgattggcaggatgccttcgcttttaagtaagtcgtagataaactttcttcctttttgcgtccattttgtatgtggtttagacttgtccgcgtcgatcgcgtgagtcgttgtttgcgtgtatcctttgtcttgatatttcgcgtacaacaaccaaatgtcaccttgtttatattggacgccgagttcgtgcaattttttgttcatcgtttttgcgctcatgccataatctttagcaattacggaaattggtattaaatttttattttgcaaaattaaatcgtaataggacgctttcggctgcagctcgttaacttgctgtgtaagtactaacttgtccgtttgcagttttttcttttcctgctgctcctcgatccattttttcgctcgctcgatcggatcatcgatcatgtaggatggcttgttcatttctgccaactgctcccgcatccgtttgaattctcgaataaaacggactttaaatttcattgcttccggcgttgtgtaagccatggaaactaatgtaaacgcatcttcagtaagattgtattttcgatactcccggccgcgttcgttggtgtaagttgactcctcaaagttgtggagtgaaaattcttgttcacctgcttcctggagcttggttatttgattttcaatatcccgtaatacaatgtcatgacgtttttcaaagacttcagcaacagtcaagctgtcagttaccggttgattgttatgaagaaaaaccagttttcccattttcacttctcctttcaagcacttttcgtttcagctgctacacactttatgcgtatcagaccaacctgcgctcgccgccaggggtgttcacaatgtgtacccccttcatccagcgctagccgccaagggtgtccactaataccgaccccctttcatcgtcatccaatcgagaaacggcatcacgatattaagccaatcgcctgttttaattttcattgattcgcccctttccgcagcctgtctcatcagcgccgggaggctatttccggcggactaggcgatcattgcgcctagtttcgacttaatttcttgcctgtaatctattagtctgctatggttataatctttgataatgagaagcacgtctgtggtctcaattaaccacccgcacttgcaacctaacagctttttccaatgatgattaacacttgaatagttagtcagttttttcttcatttaacacacctcactgtgataaaatgaaagagtaaattatatacataaacgttataggcagtttgaagcgccaacttcttactgcttttcttttttctttatttcaaccaatccgttgacaattgcttttatgtaaatgtcatgaaaagcttcatcgtcaacgttgatatattcggatagtgacttcagaataatttcagccttttcacgcattttagaccaccgcctcaaattctttgatcaggagttcggaaattttgatttggcctttcccggtaattaaggtcgtgagcttctcgacgtcaccttccgtacggcttacaatggtcgacttcacttcaaacaatccttgttccaggtaaatttgtttcggattgttatgttcacgtcctccagaaatgagatatccatgggagcgcaaccactcaaacagcttgtttcggccaatattgataccgtgcttgtcataaagcattttggcaaaagccccaatgctgattgcaccagttgagtttgaaacgacttttccaaagcttgtgtatgggagatcagctctttgttgttcaatgacctggttgcgttcttgctcggccttaacccgttttgccttttcttctttgagattagcgagcagaccaattaagaaatccgggtcactgattgttttttcgagcgtttcaggtgtcatgtaggcaccgtgttttcgaatggatggaatgacttcgtgagtgatccatcgcttaaattgcttggcttcaggtaaattacttgttagaactaaactataaagaccgaattcattaacaacactcatgttttggtatccaccaggggtgtaaactttacttacccccttttcatcttcatctagtcttgatattgcaacacgagaatttgagtgatttaaaatgtcacatacatcttttgcaacaaaccatggttcaccgtcctttaaaacggtgcgaacttcattctgtttaaagttgaaaacttgtaatgagttcaattaacaaacctccccttttgctttagtacctttaaaaggtaccattacgtaaaaattttttcgtcttcctcgtcgtacttcccgtcatgaacgattggaacacgaatcctatcttcactaattccgtaaatagacgctgcttttctcaatctccaacctgggattgccgttacaccgctttcgtagtggcgcaacgtttttgcagttacaccaatgagtttagccgcttctgactgtttaagaccggcgttaacccttgcggcctttaaagaaatctggaacattttttcacccctctcgtatttcttgatttaatcatactaccgtttaaagttagtgtcaatactttttaagcaaaaaaatattttttaaaggtatttttgctctttacaagattaccgaaaaacggtattataattgtagaaaggaggtgctaaagtggcagttgcacaagaattaaaagacatcatggccgacaatttaaaacgccatttgaagaagaaagggataacccaaaccgatttggcacgtgatttaaatatcccggaaatgacggtctctaactggatacgagccgtaacttatccaagaccggataaaattcaaatgctggctgattattttcactgtaaaaggtcagacttgacggaaaagaaaatagaacctgaaaatatttacccggtttcaaaagaggtttcatatgtaccaatattaggcgaaatagcgtgcggtgaaccaatactggtggaagaaaatttttcgggatataggatggaaccaacggaaaatttgccatccggtgaactttatttccttgaagcaaaaggaaattcgatggaaccaaccataccggatggcgcaatggtgctgatacgcaagcaaccggatgtcgaatctaatgaaattgcggccgtactggtaaacggggatacagaggcgaccctaaaaagggttagaaagcaaaacgacgtaatacttttaatgccagataaccccgaatatgatccaataatcgtaaacgaaaaaaatccggcccggataataggaaaggcagtaaggtttacaagagatttataaaatgtttggccaagcattttattgggcgggtagctcccgcctattttaatatctggaagggtggtaaaatggcaagcatacaaaagttaggcaatggttggcgctatcgtgtgtcttacaaagatgccggcaaatataagaccaaaacgaaaggcggttttcggacgaaaaaagaatgcgaactggctgctgctgaagtggaaaaaaagttgcatgtagggatggacatttcagccggcgatcaattgttttcagaatacatgcggacgtggtttgaggtatacaaaaaaggaaagtacgacatagagcatgaaagaaacattgaacggtccgtaaggcttgtcgaaaagtattttgcaggcgttaagcttaaagagattaccagggtaatgtaccaaaaatttttaaacgaaattgctaaggggcacacccgggaaacggtaaaaaaacggcatacctatataaaggcgtgcctgcaagaagcgatacaggacggcataatatttaaggatccgacatataaggtaattattaaaggggaaaaagatgcgaaatcagaggaattgaagtacctgaattttaatgacgtgcaaaagcttgttgttgaaactaagaagaatttacaaccacggtacatttcccggtatatcattttatttgcgatagctaccggtgcccgttttagcgagattatggggcttacgtgggattgtgtggattttaaaaatcgcaccattacgattaataagacctgggattttaaagatttacacggctttagcaacacaaaaaattatgcatccaagcgtacaataacgatagacaagggtaccgcggacatgttacaaaatcttaagacggagcaaaacaaaaaagctttactgacaggcctgcgcaatgaaaaaaatcttgtatttgtaaacaccaaaatgcatccagtaacgaataatgccgttaataaaacattacgaacactttgcaaaaaaataggaataaaggagataacatgccacggtttgcgccatacacacgcttctatgctcttatataagggtgttaacattaaatatatctcccgccgtcttggacataaagatattgtgacaactttgcaaacttattcgcatattttggatgaaatggaacaggcggaatccagagttgtagacgacacaatggaggatgtttttcgtgcaaaatccgtgcaaaaaaatttttaaaacccttatattcttttacaaactggacaataaaaaaacgaccgcaaatgcagtcgtatcaaggggttcagcgattttattttcaactatttaaaacctaatgacgtcccaggagggattcgannnnnnnnnnnnnnnnnnnnnnnnnnnnnnnnnnnnnnnnnnnnnnnnnnnnnnnnnnnnnnnnnnnnnnnnnnnnnnnnnnnnnnnnnnnnnnnnnnnngtggatatgtgaataagtccaatgaagcgtctcctttccacaaagggcattgaaaaacccattttgtgaaggcaggatacgtatgcccttttttggagaaaaaaatgcccattttatttctgctgaatttgaaaacctggaagaaaagaaaaaaacaggatcattaattctctagagcctcgttcaagggtaattttttattttggcagaggctcttaaaaatatcatcgatcagttcttgaatttcctgatcagacgagatattaattacacatttctcattaaaaaccagtgaagccatttcttccgctattacttttggcatcttcatagatgcccggcggcgtttatgctcatttccagcagcatccgtccatttggtgtcgtgaaatgggattcgtacatcaccttcctggtaaaaaggcaaatagccgtggtataaagacttccatacttcaattcggctgtattgtgcctcactctcctgtacggcggccagctgtgaaacattattaatttgtttgatcaatcccattttagcgagcaccccctttatcttggctaggatggttcgaaacatggcatcaccgccttaatatttcaagttcagtttccttaaattgtcatttacatagtattgaaaagcatcacaagtatggtcgtcctctttgacgactttcgggtcatcgctttgcaacgtgtcggcatcccattgatactttttgtgttcttcataaaagatttgattgttactgtttctgagcataaaaaaacgaccttgtgccagcaggtcctgaacattttcgatcatgtttacctttttcttttttgcaatcggatgtagctggataccataatctttcatgtattggtttcgcaacgctccttctgcactgtctatcgtcctcatatcgatgtttcttttaaacctcgatagttccctttcaaactctttcaagtcgtccgagaactcacttggtgccttcttaaccactcgattttgaggggaatagtaaaaagtatcgagcagaataacattaagccgttttgtaagcccaaacgcacaaaatgttgtcgccgatgtttggtatccggagtcaatcgcgatatcgatcagcagcagatcatcatcacttggcaattcatcaatccaatggaaatggttcatattgtaaaccatatcgccaagtccgataatttcacccgcatacatccagcgccagtaatcaagatcattttccttgtattgttcaattttccggatcatctgatgcgacaagaaacctttttcatcatccatgtacgttgaatggtgaacaaaataatccggatcgctagctttgctatctacccattcattcacccactcatacgggtttcgaggtgggttgtaagaataataaatttttacttccttttcgcccaggtcctgccggatgaatgtatcggaaacaatatcgatatcctcgacgcctgcgaactcggccagttcctcgaaccaaagtgccatgacatatccctttgcaatcttggcggatttgattttcatcggatcatcaacgccgtaaaaataaaaagccgtgttcgtccgtttgtgccgaatgatcaatggtgattttccaaagtagaattcattttcgactttgagcatgtatatggcccatttgatttgttcataaacggatgtggaaagatattttcctactttccgcagcaccacaacattcccctgatcatcatttaaaaaatcaacaagcaatttcaaagagatgaccgaggatttcatggatgaacggccgccttttagcacactgtttggcttctcatttagccagaaatcataaaacactggattaatcaggtcggttatcttgattgcgttcattcaaaatccgcctcatttcatcctcgttgttgatgatgatcgtccggtcgtcttggttgctttcattcgtgatttccttaatcttagcttttgttttatcaatgtttagctgcatctgttcaagcttcagacggcgttcatcatcttcgtgtgccagttcattaaactgcttgatcaagcttcgcagttctgacatggcccgagattgggcgttaagaaaagtcgcctggcgatcccaagcgaattgaaattcccactcttcttcgttcgtctcgtaattctccccgatatctgacttggttttcttaatctccttgatcatttcatcttttgattcaacgaacattattttctgcgctcgtataatagcagcatactgaatcattatctgatcccagagcatgtcgacgggagaatgctcttgaatctcttccagaatgtccagtgattcctgtggcagatatttggagaagaaaccgtgagtgacagcgttttggtttccttttggagccgcaccgcctttatttccttttgcatttatattcccgacaggtgcgccccttttattttttgtgtgcacacttttttctttgtgtgcacccttttcacgcgtccaaccataacgctttttccatgacttgaccgtatttaaagacacgccatatttttcagcaatgtccttgtatttcatgcctttgacataatctttttcagcttgaatgtatttgtccgtcacctgctacatcacctgccacctccgactatttgtgtttgttttggagcaaaataaaaagcaccccgaaggatgcttaaatgttttctctgatttcttctgtgtctaataataccgtcgtattatcatttttgtttaaaggtttcaagatgccgtttactttagtgatattggaaattattttatcagattgtgctaatgttatttggaaattcacgccaatctctgcatcttgatgtggatagttttctaattccttgattagttcataaaccttcatttcattcgcctcccttcgtcaataacttcgacaaaagaaggcaaattcctgcaataaaataagcctcgaaaccgacaaggttttaacccaggtccacatttctgctaccccgtctcgaattaagaagctcgtccgggataacctcgaacccttaattattcaccgcaaggtgaattatggttttcgtgaaatttctcacgccccggatttttcctctccggtcctgccttccattttacatatattttttcttgtgctgcatctatcctgcaaaaccggcaaatccggcatttccggcaaatccggcattttcatacatagcattgacaatgtcttcccgtataagacgaatattcctttctgatagtcccatgtgccggctaatggcaattacgctcatcccgtccagcaggcactccagcacagcacgttcgcgttctcctcgtacacaatcaacatgttcctgaataaatagaactttcttctgcagccgattaatccattgatgcgttttctcccgacgtaaaatttcacggtaaaccggatcactatttgttccttttggcttcggtaaggcggattcttccccatattgggatgtgatgttgcttctcacttcattctccagcattttacgctgtctcttgatttcgttgatcatccaatgataatcctttaatgcctgtgagatttcttgcttgttcatcttccatttctccatgctccgcctctccctcgcttatatacgggatcataatatcccataagtgtttttatatcgtgttgacttaatcgctctgatttcgtctttctcggccttcctcgtggcttattttccttattttgattctgctttccccatttcttcaactcaccacgtaatgtgcccatatctgtcatccttcctgataataaaaaaggacaccaaacgacaatttccttgccatctagtgtcctgggtttttcccttagacttaaacatatgcatctattttcggtagcatccaccgcaactcatcgtaatagtttggatagaattcccgcaaccagataatacgtccacgttcagcaccgtctgtcgtcgcccaaccagtgttacggatccagtcgcgtgtttggtatttttgataatcatataatttaggataatccaaatttcgagatacgatataagcccatacgtcttttgcatcccagtaggcaatgggcgcacatcggtaaaatccctgcttgttctcaaatgtcacaccaaaagatgtgaccatccatttcctttgagctgattcttgtttgcggataccccaaaagattccgttatagccatgttcttttgcccatttatcagagacatccttctttaaaactttgagtgccttattttgcatgttcgttgttcgattgatacccggaattccgaacttttcccaaacctcttgtattgggcgacggtcagcaaaatatgctctactaatatttattttatatcgctcctgtgataattcaatagtctcatatatttctgggagtttatagtcgctatccatgaagtatacggggatctcatccatcacctggcttaataaatccagcatcacgagactatccttcccaaagctaacggatgcagaccacttaatgccttctattgccagtgcttcgcgaataatttctaaacttcttgatacttttcttttaaatcccggcagcgtcgcacgcagcatgtacgtttctttctctgcttctgtcatcatttgttttcgcgtccccttttgccaatatttttgtaactcccattcccatttgccgtttaagcccaacacccgcaaattcagcaaaccgaaaaagaatatttgctttttgaacgtatgcctcatctccgtaaaatttaaatccaacttttccataaaaaacagtgtatggcctgtagtcggctattttttgcgttgctgaatgtatgttcaaaaatttaatcaccgtatattccctggtattttcaccgtgaaaagggattttaatatcgattttatctggaaaaagctggttccacctgtctttcaaactctgtaaaatatgatttggatctgggatcggtgtatcatatccttttcgggaaaacgtcgtattgttaaactgtacgagaattgtcacattgtcatatttcttatttaacaaatctttatatgaaacatcacgcaaaatttcgataccattcaggtttttaaaaaatggttcaatctccaaacctatcacattgacaatgtcaggcaattcaatactaaacggattgtattcgtggttatcgtgaaccattttagacagcacaggagaatgtttatgaatgatcgccaatactgcatcatacatggcttttccatcatcaaattggataggtagttttattttaagcaagctgatctctccttacatttgggataatacacggcacctggcccgtatgtaggtgatagggcggtttcattcgtattttcttaatttgatatgcttgaccatcgtccggaagttcacctttaaacgggcgtgcccgcatgattccatacggaccgatatctgtataatcgtcttcgctttcttctatggcccattctcgtatatatccatagccttgagatgctttcttgccaatattcgttatatgagcaagcaagtgccggatcccgtttggatcaccaaccgcgtaaaattcaatatcacttacgattctgatcatttgtggcatgcggtaagctttaaactcaccggacgcaccgtttattttgccgcgctttccaccaaaatcaacgtaataagccgcgtcaaaatcgtttactttcttatgccagtactcaacggtttcagcatattgcttataaaatcctagagatactttccaccttccgtcctcatctttagctagaggaagatctggttctattaggttatctggctttaaattgttattgagcagatcgtccggatggttttccaacatccacgcataggccaatatgctgtcgagattaaaaatgccatcattggagttcacgcgcccgtccaaaagacgggccgtgatcttcaaattcttcatttcacctcacctgccagcagcttggtgaattcttctttgttgtcaattaaataagcatcatacatttcctgcagatgagcatcatatgcagcctttgcctgttctgcggtcgttcctagcttgataaattcctgtccaatctgtgcaaattgttcgcgtccgtcttccgttaccaattccatatcggctgcaaccaatccaaaacccttgccgctcatgcccccaaggtaaggctgcttctgccattcgtgcagggctgatacaaatgccccaagctctaattcatcgcagataatatcccaacggtgccatagtttcgtaccggccgctaaatattcgacgccgtaccgcatttgtgtagctgggccatctttttctttcttctttttggtggtttctccctcgagtaattgctgttctccttgtccaattaaaaactgctccgcaagattcacattcttctcgtcatctttccgggtaaactcaatcacatttgtaaaatgtctccaactatagtcggacttttcaacataacttgggatgatattgttcgtttccctgcagacaggataaacaaatgtttgctttagctttccatccaaaatctgatttccgacgcctccgccaaatagggagacaaatggaagggccttgcggatgatcttagcctggtcaatatccagtgcctgggccccaccaattgagccgccgctgaaaagcaaatggaaggcttttaacgggacacgaatatctaaccggtttagtaagtaacgcgccccacagtcccgcagcatgcctctcaaagcatttcccgtataaacaaatacttcctccggctttccatcgttgacgactgtagccgtgttcagaaaactttgagttgattcactttccccgatatggcttaacggttgcaacaatgtataaatggtttctaaacggtaatgattcatcttagttttcctcctcaattatgatttcttccagtttgtgttcaatcggtttttctctttccaaccgatcacggaccagcataatcacacgggccgtttccttgtacaattcataaaggatctgttgatcttttccactttccatgatttcagttaaaaattgtcggtttttgccgtccgtatcgttaccagtcacgataatattgccaagttcgtcttggatggccgacattacctgactgccactttcacaccattttgggttgatcgtttcacatgccattttgcgcttaaatgtttctaaaaaagatccaatgctaattgctcgctttgcgctgactttggtgaaccgttcgatttgcccccacatgtcgattccgctgggccctcttttcctgttacggcttcggtagacggcgtagacaagtaaggctgctgctcctgcagattgatctttagttctgaaaccataaaacacttcaattcctcctcgttttctattctttgtgccacaaacataacgacgtctaaaaatggcgtaccccggtatggttttacctgttcttcaaaggcttcccatgcatcgatcccaaaatcaaggatccgcttttgactatattctcctgttgtgatttcagttttggtaaagccatataaaaaatgttcaactattgttagtagctttttaaatttttttaatacaatcagcaccggcatttcctcgtacatgaccgtaaatatgtcgcgtgaataattaacctcccctttaaaggcaatgtgctttttctgcgaaacggccaggttgaccacaaaaggaggatcaggtggccgcagcaagaattctcgcatttccacccggttcggcagccacaggtgttcttcattcgccacattggagaatgttctcaatccgtaccgttcctttgtggtcaaaattgaaaagcagcaggccgggcagacgtgggtaccggacgggttttttgcctggttccagtccgtgaatacgtttgagaatacctttttcagcttcatcccgtgtgtcatttgctttccacagaggaagcaggccccggtatgttcctccatgtccttatgctgcatcgggtctacaaacttaatattccgtatgatctcatttccttttccgtctttcgtgttctgccagatcacaccgttttcatccttcgtcttcttccaagcagaatagattaaatgtgtgggcattccggcaccaaccttccccttttttggttaatttgaatgtaccgctgctgtaccttttccagtctacatatccgtgtgcttttaattttttgagatgatagttcgtgcaaccgggcgatagtctcaatgcttttgaaatttccaaatttgtaggactccgtttgttgcgcgtctgaaaatatttaataaagcgcaatacccgtaaatgccgtggtgtcaactccgcatgccagtttctcggaatgttaaacttgtccagtattcgttccatccttggccgtccgatatgcaatgattttgccaaacttaaaacgtccatgccgctgtcgatatacatcaaaatcaaatcatcacgggtaaaaaaacaatttccaacccgtatctccgtttcttcattcaatgtgtagcagcgttcagcccgcatcttgtcacctcactatttattccatatcagcctgccaagtgacaggccgaaaatgaatccgccaagaaaaatcagtaacatttcactatctccttctttcaatacagtacaatgacttctattggattttttaatgtaccaattcggtcaatgttaacttcatctaattcaactaatgaaccgtcatcgtatctgctaggaatgaatactttcgcatctcctgcaagttcattcgcttttaataattcaatcaattcatcttttgtcataattgtccacccttcgaattttggttcaaccaataatgtgtttgtccaattccgcctgcgctttaaataatttttgtaggttcattatttatcctcctctttctcaaaccaagtgaattcttcaccaacttcatcccaaacccaatcctcaaatgcatctatgatttctttatccgtcgaattatcttcaaactcaaattcttcctcgattggcgtgaattgtggtcccctgtttcttagaaaaactattgttctcataacttgctcctatcccttgtattggtttttatggatcaatgcatattcctggccactcaccataatttttgtcggcaggcctcgctttacctttagcaccgttacaatcgggcgaaatttttcgccctttttccgtacctttggtttcatatctttcacctccatcctatatgacatcctgcccgattagtctcatccgatcgatacgctctatatcaaaaacctttccgttttgccatatcaagatatcctggccaaaagattttggagtcactttagtcagctgcccatcctggacgatatacacagctgtctccatcaaatctatttcagttgtcatgttttgtttattatcttccaataggttcacccctcgtggtaaaattaggtatcagctgtttaccacgccgggggaacccggctttttttatacacccattcaaagtgcaaggcttagttgttcaaattgcggttttggatccggtactggtttccgtgaacgtgcccatctcaaaatatggtttggcgtcatccatacgtctgaaaatttataggaaagcgtatcgccctgcagaatgaccgcatccacgccaagaaggctcagctgcagataacacatgtgaactgcttttgcatcgatatcttgtgccacaacccgcatacaggcctgataatttaactttcgtttttccaatgcattgaccatgccgattatggttgctcctccaccacaagcaggctcatttaatgtgaagtaaccgttcttcttaatttgcttctcatatccgctaattgtcagttctgcaaacatatttgcaagcgacatcggtgtaaaaaactgaccatgccaggaacttgaaagttccaatttcataaagatatcacccagcacatctgacggatgcttgtccagtgagttaatcagctcacccaggatttgaggaaatattttcatttccttcttgtcatactttttcacgatatccatgtatcgtgcctcacgctctttcatatgttgaaaatctactgcgtttgaaatagatatcgccgacatttcaagaaaatccgcaaagacagtaaacatatcgtgcctgtatcgcagtttttcaaaaagcttgatcatccggtcaaccgacattgtctccatcacttccagtcgtatttgccgtcacgtttcaccaacacggcgtgtctcttgctaaagatactttccttacgcacctgttccttgtttaggccttcttcaaaaaccgtgatgaccattaattcttcccggtcatgagatatggcccgatgttcagtgacccttcttgtcatttccaatcacatcggtcgtgcgctcaccgcgtcttactcgttccagctgttccggagttagataccagattgtaaccttgccggggcgtttggctctccatccggtgctggttcggagattgtatctgtcctaaggatcatgaacgtaagttactgtcatccataccactcctaaactgtttattttggcttataagccgttttaagattttggtatataaatagtcatgttccgttttaaaacgggtatatgaggcaatagagaagtccagcgcctaaatccctgcctgcgctattttcttcgctgccttccgtttcttctccaattcctccaattcaatccatccgccccatttcttgctgtatgtaaccaggctgagtttatggggatatttatgctcgaacagctttttctttatcttgaacgcttcagtttccatgccctttacatccacaacctcgatggatccatccaaatggtgaatctcaaaatctgcgatgtactcaatcttgcggtatttttttccgtttttctcgaaagcttcctgaagcaagtaccgcggctgtagccggaaaaataagattcgattgttttcctgaagccatttcaattgctcgtagtaacgggcttcgattttgctgtcaaaaacatatccgtccaatttaacttttttcgatccgtacttcgttttcttggtaagctggcggtattctttcgctgtcattcgttcctgcatgtttgcacctcaatatccattttcctgccgtctatagttcactttgtttttctcaaagtacgctttctcgatttgttcccaggtaaagccgagcatttcacctagtccaaggaagtttgaaaaaagaaattcataccatgcttttctgctatcttctgtatattgtctaaaagttgaagcacattcaaatacttcttgccattgcattgttaatttatcggcgccaaagctgaccgcaacactggaataccaaggatttatatcttgcaacccaagacggtttccaatgctcaaaataaaatgcaggcaatcaacgtattcttcaagtaaaggatttttgtatccgtaaacacctgatccatcacaccttttacaaggccaaggttctccaccttcaaaaacttcatcgtggttcatgtaacctttaccgtaacaatacggacaatcaatcggtatttctgttctcggctcttggtcattgcgccaaaacttaaaccctcgccattcttgcgcacattctccgagctcaacttgcaaagccaggattaagttcggtagcaaattaacgccctgcaatcctttcttttcaataatgtgctggtccagttccgcctgtgcttcaaataatttttgtaggttcacttaaagtactcctccccaaatgctttcttaaatttttctatcgtcttgggcccgatcccgggcgtctcagccagtttgtttagccttgcctgcataaatccaatcgctttgctaatgcccatctgcatgccgatctcgattccctcacgcttgccacgctcataagcctgctggataaccggattttttgccatatcaatcccccatttgtattttttggagggttaaagcgtacaccagatcgtgataagataagtcgtagattgattgattattgaattgagttacaccgttattttcgagttggcggagtaggtggctccgcttcaactcggtaattgtggcgtttgtcattttagtacaccctttctatcttgagttgatcccgtgcttcttccaaacgtcgttgcaaaatgatttcttctttcttaatttgctcttgcggcttcggtccgcacgccgggcaaggttttaccatgattccaaatcccatatcctcgtaaacaacatgccggccattgcatagttcacacatcagcttgctcctttcttgatacgccagtcagtcccctcggcttcaagcaggtattttccgcactgcccaattagccggcttgcggccgcatatcctactttttctgccaaggtgccgcgatcctcattcgagttgaatacaatcggtttctgtttccggtatcgctcgttaataatctggtagtaaagagattccttcgcttccgaccacttcactttgccgatgtcatcccaaatcagtacatctgcatttgtggccgcataaagcaaacggttcagctgctctccctcatcgttcatcattcgggcctgaataagctcatccatgaaagtgacatctgatataaccagaacattgaatccgtctttaatcaggcgttttgccagtgcaatctgcagatgagtctttccaatcccaaaattgttatgttgctgtttcacggcggcccgctctgctgatggcaattctttcatgcgctgttcgccaaaaactgcaatcaacccaaaattatgggaagaaaccgttttttccttttcgccattttcattggtcgtcatcttgtattcttgcaaatacctttttgtaaggtcatacatgtcttcttggatttggctcgtacgctgatagttttcaaaattggcgtttgtaaactcatctggaatcatggagtttcggaaccggcgccgccatgcttttctttcccgacattcgcaaggcttagcaacttcatatccctgctcattccgataaaaaacaaattccgtatccttacaaatcgggcattcgtaatcatccgccccaagctcgtcttgcttcttcggcttctcggattgcctgttctgcgctttttccagcaggtcggccataacttctgcgatactttggaatctttgttccattgtcttcacctctctctgcttcctgcttctcgataaaccggtcaaatatatatccggcgcaatagtcaagcgtcttgatgtagtcttttggatgtttaggctggtaagacgcaaatttctcttccatccatttgattgcatcatcgacattgacaccgtattggatgatctcatctgctgctgctttatccttaggggtagccacaaatccgtgattccttaactctataaatcgattgagaagcttatttacagcagctgcttcattatttagtccattattatttagttcatcaatacttagttctttattacttagtagtttcgggttttccgtcgacggataatccgtcaacggtttttccgtaagcggattttccgtcaacggttttcccggtaacggttgatccatttgagggacttcaaaaacaagtgtttcatagttgaatgtcccgtcctcattccggtgctgcacccgctttaaataacccagatctcgcagttctttaagcgcagtccgaagtgagtcgcgtccgtccttagcatgtttttgcaactctgtgtcataaaacctccaatcgtcgggtaaagaaagcatataggcatgcagccctttcgctttccagctcagccgttcatccataagcgatgttttattcattacgacgtagttgccgttcttttggactctgtatatgttggccatgctttcaccacctcaatttcctgtgttgtttccccctcgaggtgagggggattttttcagaatggaaggtcattttcatccatttcaacagccgatttcttatcttccacttttgcctgtttctttgcctgctccggttgtggcgctttttctttcttggcttccggttctggattgtaatcaatgatttcaggttcttccgcattcgtttcatccgtgatatcatgtgtttccttttcgtcctcaatgacagccgtctgcatttcaatgctcaaaattccccacttactgagcatgttgcggatgaccgttttcatggccatagcgtcataatcgcttttccatacattattgagagcattcttgtccttcatcttgttatgcttaatcctgtgcgcttcgatctcatccttggtccagtagaccgtcttttcaaagccattgatcagcttgaaatatccgcagtatccgattaccttctcgcttgtggcaccttctaaatccagttcgatttcttcggtcagccggttccacttaatgagctcaccttcatgaacagcgatgacgttaattgctttatattgaccagtccgtaatgccagttgaatgtaccccttataaccaagctggaactgtgctaccttatggcctttcttactgtcataaaatggaacgatccaggcataacctaggtttttgtcaactggaagatcaaggcttgctgcgaccattgcacttgaaataatactcattggctcggcggcctgaatgttcggatcaccgttataaaggttgagcagagaagacataaattgtggtgccttcttgtccaaaacttgttcaaactttttttgcatcgttggggtattgagcaaagcttttaaccccaacgattgagcagatacttgtttggttccttcctgtttacttgcaatttggttttttagcgctgcatttgttgccattatttttcctccttaaccgcaagtttgcggaatgatgtttctttaataacttgctggtgaatatcggggaacttttcccgtaatgctttggaatcaacgcgtttctgtacctgcttcttccaagtgacgatatagtcgccaacccggccaatctccgcttctttcagctcagctttaagtttgttttcaatctcagttttcgcagctttaatcagcttctcgttttccttgattttgaagtattcttccaaataggcattgaaatcttttggaagaacgatctctttatcaggatccgatttggcatatttttcggccagatacttctcagccgcgctgcttccgtccagttcaggggcaactccggccagcacattgttttcccaaaaatccttttcagcttggaaaatcatgctgatcagttcatcgtcgcgttcgatttctttccatacgaaccgattccctccgatcagcacggcaatatatcctttttccttgccggtaacgcccagatagtgctggacttggacaaggtaagaggctggaacctcgtcacctgcccactcttttgcaaggtaagcgctggccgtcttgcattcaagtacggccgattctccaactaccaacctatcgacattggcacggataaaaggataatctggatggctgtacataaagtttgaccggcgtacctttttatccgttcgtttttcaaactcttttgccacgacattttccatttggtttccccaatagatcgcttcactgtcgccttcttggggctcgacctggccagtcttttcaagccagagttcgaaaggcgtcttgtatttattcaagccaaggatgacgccggcatcactaccgccaatccccttggtgcgagcctgaagccattcatgccggctcatttcttttgtgggaatagcgttttgattcatcgccatgcttcttcacctcttgataaaattttcaaagaccgatagaattaaggtgtagtcttatttaaagcaccttactcccacggcaatggaagttttttattatgccgtgtaaaactttgcgtcgtagagctcaaccaaaaatttttgaagattgtcttgtaaaacaatctccccatccatttcaaccacgtcgtcgccataaaagatttcatcaccgaagtagtcataaccgaaaagctccggctcattattttgcagatatccaaatcgacgcactctggtaatatccgggtgttcaattgtgttaatcattcgtaatcattccttcctggcttaagtcaagcatgtaatgctgtgaatacgaatcttccgtttcaccgtcgaaaacaattccgtacttgaagatagaagcatcatcattgaaaatcgttttgctctccccgttcatgaaaactgagatatggcaaatctcaccatttttataccaattaatcgaatggattttgaatcgtttcccattcacattaagcactggctgtttcactcttttcactccttccagcttgaattgccaaacacaacaatatgtgcttttcaaaacgattcagtttaagccaatcacctgttttaattttcattgattcgcccctttccgcagcctgtctcatcagcgccgggaggctatctccggcggactaggcgatcattgcgcctagtttcgacttaatttcttgcctgtaatcaattagcctgctatggttgtaatctttgataatgagaagcacgtctgtggtctcaatgaaccatccgcacttgcaacctagcagctttttccaatgatgatcaacgcttgaatagttagtcagttttttcttcatttaacacacctcactgtgatacaatgaaagagtaaattacatgcgtgaacgttataggcagtttgaagcgccaacttcttactgcttttcttttttcctgatttcaaccaatccgttgacaattgctttaatgtaaatgtcatgaaaagcttcatcgtcaacgttgatatattcggatagtgacttcagaataatttcagccttttcgtaaatattcatttcaaccattcctctaaaacccatctcccaatgattatggccggcaggaacaaccccatgaaaaatagctcacccattttgttggccacccaaaaatataattttgtgaatatcaatgcctttttcgatcaactcaaagatcatggcattgattcggtcctgttgaactttccgctccttcagtcgcttaagttctgcaagtgaccggttgaaatcaatcattcgcatttctgccatgtcgatctgcccaatttccagttcagtttcagcgagatgcaggcaggttttacagcatttgtaatgttcgattgccttcggcaaatcagccggtagaaaatcttctttggtaatcatcaaactctcctctcacttctcagtttttttaggactttcttcgattcttctaaaaccgaaagtccgtagtctctttccaacaccatgagcaggttgtcaatcgccacccgcgcttcaatgagctcgtgcatcatgcgacggacattctcccgctcgtcctttgaacacacatttggcggctttaccaaggaaacttcattgatgatcctgataacatcttttacctctgcttccgtgatttcttcaagtaccattcggtgccgttcgacgtatggaccgcccataaccgggctagcgaggccgtccgaaaactcgtgcaggatggatgcctcaaactcatagttttggtagatctgcatggcccggtgggcaacatccttgttcatggtcctctccccttttcgctgtttgttaaccgattcgtatgattgataagtgtccttcgcgatctgtttctgtgttagcccatcttgttgcagaatcgccaaggcttcttgcacctttgcggattctctcatcagttttcctcctgtacaaagttcttgtttattctggacatcaaaaaaagtaagataaaactagaacgatgcaacactgttttcctgggcagcaatccagttgtcgattgattcacgtgaaaagaagatgcgtttcctaactcggaaaaatgggatctgcttttcacggaccatggtataaatcgtgtctggatgaacccctaaataggttgcaacttcctggactgttagggtgttgtgacgcattttagaccaccgcctcaaattctttgatcaggagttcggcgattttgatttgacctttgccagtaattaaaggtgtaagcttctcaacatcaccttctgttcggctgacaatagttggttttacaacaaacaatccttgttccagataaatttgtttaggattgttatgttcacgtcctccagaaatgagatatccatgggagcgcaaccactcaaacagcttgtttcggccaatattgataccgtgcttgtcataaagcattttggcaaaagccccaatgctgactgcaccggttgagtttgacacgacttttccaaagctggtgtatgggagatcagctctttgttgttcaatgacccggttgcgttcttgctcggccttaacccgttttgccttttcttctttgagattagtgagcagaccaattaagaaatccgggtcactgattgttttttcgagcgtttctggtgtcatatatgcgccatgttttcggatggacgggataacctcgtgggtaatccagcgtttgaattcttttgcttctggtttgcggcttttaagaatgactgaatacaaaccaggctcattaataattgtcatgtgttgctcgccgccaggggtgtgcacaatgtgtacccccttttcatcttcatccagaatgcgtgtcattgttggtgtatgctcaaaacccaaaataactgatacatcttttgcgacaaaccaaggttcatctccttttaaaatggtgcgaacttcattctgtttaaagttgaaaacttgtaatgagttcaattaacaaacctcctttgcttttgttgctgatttagcaacgttttttataaaaaaatctgatacactgcattgcagtagcttggctaaaatgggcagttgatttgcccttaactgatattctcccctttcgtattttaaataggttgaggcattcctgaatcctaatccatccgccatatactgaagtgaaagattgagttctttccttcttttaacaatgaacgcaaggttaaactgttgcatgatgtcctcctttcttgttgctatattaacaacttgtctctattataagttgttattttggcaaagtcaacatttttttgttgttatttcagcaaaaaatatgtttctaaaacagaaacatgataaaatattattgctaaaacagaaaaaagcgtggtgataccatgtccgaaccaggtcagattattaaaaaactaagggaacagaacaactggtctttgagggaagttgaaaaacgaataggaatagattattcggtgataagcagaattgaatccggtaaacgtccgttgaaagaccaagaaataaaagcgtttgctgatttatttggagtaacgactgcttacatattgggtgaagaggacaaggaaattgatgttgctggagaaaaaatcacattggataaagatgaatatgaagtttttaaggaattattgaaacatccatcattattccatgatttaaaaaaagatcccgaaaaaaacgtaaggcacttgataaaatcttatgagttatacaagaaatatgtagaggaagcattaaaggatgataatgactatttagaatgacatatccgatttgaggtggaacaatgagacttcgacaatttattttaatgaagaaaaaagatttttacgaagaagaggcaaagaaaatattgaaacatgttcaattcaagcatccgtctgaaattgatctatttacactatgcgatttatatggcatgaaaataaatcacatcaaggaaccatacagtcgatcctggcctattaaagataagcgacggggccttattgaattagggacatacaaaaatgaaattgtcgaaagacaaattcttgctgaagaattttctcatttgtatctacactattcaaacgaattgctgatgaacgaatattcactgaataaaacggaactgcaggctttcaaattggctgcaaatttattaatgccggttagctggatattaaaagctgatgtttctcaacattataataatcgtcaaattttagctgatgaacttgcgaaagaatataatgtgacggttgattttgctttgaaccgcttaaatttattgcaggaaacttgtattttcaatacagattctgatgaattacgtgagctacaaccagatccaatattttatagaattccaaacgtaaaaaagcagaatttagtaatcatggctaacggcaaggaacaattttcactgtaaaccaactggaaaaacttataactcgaggcgaatatatatgagaaaaattgttatttcattaataacattatctgtaattttatcattaatgggctgcggcaagcctcaagctcaagcgcctaagcgccatgttaactatattgcgccaactgaatataaaaatttgaaaataggaatgacaaaaaaacaagtgattaaggcaatagggaagccaacgaagaaagaccctaataatagcaacatgtggtattacagcattaaacataaattagcaaaagattcttatgtaattcttacatttgacatgagtgatgatattaactcaaacgcttatgtgttgataaggaaagagcaacagggacttttgacagcttatgacacttctgtcgatcaatttactggtaaagatacaaatgataaatcaaatacagcttcttccgattccagctcggatacagtcgaatcagataccatgaaaggagcatccagcagctccgagttaaaattagccgctaaaaaagcagataaagacaatgtaaaaacagcttatataaaagataaaattgcagtgatcgaattcaaagatgaatttgaaacgaatgagaaaaccatgctccagaatttcgctttatacagtactcgactcatggaaaaagaaaaaaataatccgaatgtaaatggatttgcctttatccgtgacacgacatttgaagacaataaaggaaacaaaactacaggaacagcaattattgcttattttacaaaaaaggatgcgaattcgatttcttacgggaactttcggaatcttgtcgatctgaacccatataagttttacaaagtggcaagtggatattacatcaatccggcaatttacaaagatgtaaagccatttatgcatggtttatctgcatataaaaattcaagtgactataaactatccaatgatttttctaaggaattggcatcatattaatttctatcttatataaattgtaaaatgagctaagggggaaaaatgatgaaaaaaggaagtctatggtgcttgggtgttcttgttgttttgttcatcctttcggtaattggtaaatatttatatggtttttttctattactgtcactcgcatgtttctttttattgattgccggtttgtttgaacctaaactagcattttggtctaagaaaaaaacaagaaaatccgctggtataggttaccttattttaacaattgttttctctgtactttttgcaattttttcgcccaaccaagatgtagcaactaaagataataaggcaaaaacagcttcatctgaaattaaaaaagaagaaagtaaaaagagcaacatctctgctaagaaggcagatgatggtaaaaaagaggaaaaaaacaagcaagcagatgagaataaaagggcagatgagcaaaagaaagataaagcatctgtggccgcaggcaccactgccgcagtaagtactaaaaataagcaatccaaatccaataataccaacaagcaaaaaacaagtgctacaccaaccaatcaagagccggtaacactagttgaaactgttgatggggataccataaaggtaaactacaaaggtaaaaccgaaacagtgcgttatttacttgttgacacgccagaggaaaagaaacctggtacttgcgtacagccgtatgcagttagtgcttataacaagaataagcagctggttaacagtggtaagctgactcttgaatttgaaacgaatggcgacaaatacgataaatatggtcggttactagcatatgtatttgtaaatggtaaatcagtccaagaggagttgctgaaaggtggatatgcccgggtagcttacatttataacccaccgtataagtatctgtccaaatatgaaagtgatgaaaataccgctaaaagcaatcatctcaacatatggtcagaaagtggatatgtaacggactctggatttaatggttgtgcaaagacatcaagtggaacaagcacggcttccagtgactccagcacaacaagccattcaacgaattctggatcttcaaatggttcaagctcatcggccacgagcgcccctacttcttccggaggcacagaaatttttgcaaactgtaccgagttgagaaaaaaatatccaaacggagtgccgaaaggacaccctgcttatcaagaaaagatggaccgggatcacgacaattatgcatgtgaaagataagaaaggccctgaggggcttttctttagaactaaagaagaacatacgtacttaattttctgtacaatgtcaatgagttttttgtacaaaatggaggtaaatgaatatggcaagtatacaaaaacgtggtgcaaactcttttctacttgttgttgagattggatatagtgcgaagggaaaacgcctaaaaagaacaaaaacaatccatgttaatgatccgcagttattaaagaaaaagaaaaaactcaatgagtatttaaatgatgaactgacaaaatttaaaattgaagtggaagccggggaatatattgcgcctgaaaaaatggtactatctgagtttgtaaaggaatgggagaaaaaatatgcaaaagaagccctgtcaggtggcactttaaataattatctgagcaactttaaaaaccatatagaaccggtgcttggtgaccttaggctagaccaaatcaaaacaatacacatcgtaaaccttttgaataatctaaagcgcaccgatggaaatggggaaagttcaatccacgtcaaacaatatacataccgggtgataaggaacatcatgagccgtgcttacgaatggaagctggtaaaaaacaatccggtagacggtgtgaaaaagccacgaaataaggatgaggaaatgcacaaagttaatgtgtatgacgaggaagaagtggaacaactttttttagctgtacaatctgagccgatccattggcgtatctttacttccctcgcattggccggcgggctgcggaaaggcgaattattagggcttgaagtctcgaaaataaactttgacgagcagacaattgagattgaccagaccattgtaatgggagaaaataataaacccgaaatcaagtcaactaaaactaaaaagtcggcacgccttgtctcgttgcctaaaaccgttatggatgagctaaagttttatgtaaagtatcttgaaaaagaaaaggaaaaaatgggcgatgcatatgagcaagaacaccaatggctgttttgtaacgaatacggtcatcatctttatccgacgacaccaagcaaatggtggtcccgatttgttaaaaaagctggagtaaggcatatccgcctgcacgatctgcgacatacttcggctacgcttctaattaaccagggtgtgcatgctaaaattatatcagaaagacttgggcatgctgatatcggtattacgatggatacttacggccacgcgctccgaactgcggataagtcggcagctgaaaaattggatactattttccggtcaaaaagccaaaaagaatcaaaccgtcaacaatccgtcaacaagtcataaattgtgcttccgtgagctacaatttattgaaaagcaaaaaacgctcaaacccttttatatcaagaggtttgagcgtttaaactttaagcggaagacgggactcgaacccgcgacccacaccttgggaaggtgttaggcccacaccttgggaaggtgttgttctaccactaaactacttccgcatatttgtagaataccacatattttaaaaaaagaaaagagtgagccatgcaggattcgaacctgcgaccctctgattaaaagtcagatgctctaccaactgagctaatggctcgtaaaaatctatatatccattggcgtaaccaattcaatagaaaaggctgggccagctggattcgaaccaacgcatgacggagtcaaagtccgttgccttaccgcttggctatggcccaattatctatagtatgaaccctctcaccaaaaaaatgcaccaaagtgcatgcccaaaaaatgaggtggtggagggggacggattcgaaccgccgaaccctgagggagcggatttacagtccgccgcgtttagccacttcgctacccctccgtaaatggtgccggccagaggacttgaacccccaacctactgattacaagtcagttgctctaccaattgagctagaccggcatacaaatggaggatgacgggctcgaaccgccgaccctctgcttgtaaggcagacgctctcccagctgagctaatcctccaaatatgtaaatggtgacccgtacgggattcgaacccgtgttaccgccgtgaaagggcggtgtcttaaccgcttgaccaacgggccaaaaaaatataagcttccaatcgggctcgaaccgatgacctcttccttaccatggaagtgctctacctgctgagctatggaagcatatgactccgcaggtaggattcgaacctacgaccgatcggttaacagccgattgctctaccactgagctactgcggaatatcgggcccggcagcgtcctactctcgcagggggaaacccccaactaccatcggcgctggaaagcttaacttccgagttcgggatgtgttcgggtgtgacctttccgccatcgccaccggacctcaatgacaaaaatcattataacaaagtttccattgcttatcaacaggaattatgtgattccctgaaaaccggatgggagaaaaaactgtaaacggagaatagctttggtttctaactttgaaaattgtctagctccagcgcctatcggctagcgtatttctgcgctttctccctacgataagcgggcatcggctcgcctttagggctcgtcgtgtttcctttatctcagtcgaaagctccgaaatccgtacgccgatgggcaaggcgcttccgcttttctattgtccagcttcggtgcctagcccctcgaggtcgaatcacctgcccgccacggagccaaaagacggctccatgccggtcagaacattcgcttgtcggggctaaacaaggcaccttcgcttttctatttggttaagtcctcgatcgatnnnnnnnnnnnnnnnnnnnnnnnnnnnnnnnnnnnnnnnnnnnnnnnnnnnnnnnnnnnnnnnnnnnnnnnnnnnnnnnnnnnnnnnnnnnnnnnnnnnnggcagccgaagccgcctttcctttttcctccatgcggaggaaaaaactatccggtattagccccggtttcccggcgttatcccggtcttacaggcaggttgcccacgtgttactcacccgtccgccgctaaccttttaaaagcaagcttttaaaaggtccgcacgacttgcatgtattaggcacgccgccagcgttcgtcctgagccaggatcaaactctcagtaaagatgtttgataaaagctcaaaaagaatttgacgtttcgttttgtccagttttcaaggaacaatctttgctgtttcttcataacagcgacttttacattatatcaagtataaagtgcgttgtcaacacttttttatctgccatgcctcatgtgaagcagcgacatttactaatataccaagatagcaaatccatgtcaacagtctttgtgtatttttattctatattttttagcttatggagggaatccggatttagcttgttaccgttatgcttcgtagcggatttctcctccgccgctggtcacgattgccaattttcctgtgaaatcaaatgtttggactggcaccaccctttccaaattaggttcattttcagtgtaatggttcgcaaagaagaaatgaatggaaacgttttcataatttgtgtctatttttttgcaatcggcccttagatgcttctttcccggcacaggcaataatgaaaatcatcggcaaattcactgcaggcgcccatgatgcaacagcagcactggaaaaagcgggggctggtcaagcgcccccgcggtccatttgataaagtttgcggtaacgcgcatggttttccattaaaaccgcgtgtgtgccctgcatggcgatttttccttcatccaaaaagacgatctgatccattttttccataccggccagatggtgggtaatgaaaatcaccgttttatcctttaaaacttcaaacatcgtatcgagcaggtctttttctatcagggggtcaagcccgacagtcggttcatccaaaatgaccacaggcgtattttgcagcaggatccgcgcgagggcgattctttgccgctcgcctcccgaaaaacgctggccggtttcctccatttgggtatggatcccatttggaagggagtggaggtaccggtcaagtttgacttgccggatggcctcctcgatttctacgggtgtggcgccggggcgtccgagggcaacgttattttcgactgttgtcgcgaacaaataaggtttctggttcaaaacgctgaccagctggtgaatcccttcgccgtatgctgccggggcatgcccgccgatggaaacggtccctgaagcaggctgcagcgccccgatcagcagatggagaagcgtcgatttgcctgccccgcttttgccaagcacggcaatcttctgcccgtggggaatggtgagtgacacatcgttcaaagctgcggccggttcgttttcataatagtaaaagacgtgttccaaacggatctccgctttctctcccggaactgcactgggactgcttttatccgggacatgttgccggatcgtgtcaatccgttgcagggattctttgtatgccggaatcttttccaccgccgcggatgccgggataatgccttccagaatcggaagggttacaagcgtaaaagacgcaatataggtcggggcgatatctccgtgcattgcggcatgccctgcccagatgccggcaaatattaaaatgatgcccgagatgacctgcagctgaaagttccggttatggttccaaaaagacatctttctttctatttcatgactcttccggctgtcttcataaaactgccggaagaaccgttctttctttccgctgatgatccagtcgcggatgccgaataaagtatccgtgacgctccggtacagccggctctgtgtttctttcagcgcgatttgccgttttttcatgaaatataaggataaaagcgggtaaacaaacaggatgatccccattaatatggcaatccacaacgcaaacagaaagtcaaatgcagccagcgtgcaaactgaatataaaaacaaaaacagcgccgttacaacaggaaaaatggtgcggatataagcgtcctgcaagtgctcgatgtcatcggcaagcgtgccgagcagatcccccgcctgaaaacgggagcggataaacagcgcctgcggttcgagcatttcatacagtttgacgcgcatatcggcaagaatcttcaacaccgtattatgcccgctaagccgctcaaaataacgggcgaccggccgcgcgatcccgaaagcgcggacgccgacgatcggcacataaatcaaaagaattgtcgccggcatttccgacgcccttgtgatcaaatagccggacgtaaaggtgagcatcgatgaagcaagaaaagcaacaatgccaagcaggacagtagctgccatcagccaccggtactggcggatatacggtttaatataccgcttgaagtatgccatgttctgcccctccccgctgcgcctcgacaagttcgtaaaaggcgccttttttccggtacagttcttcatatgtgcccgcttctctaagcctgccgccatccatcaccaaaatcaagtccatttcttttacccagtgcaggcggtgggtggcaaaaaagacaagtttctgttcaaaaagcgggagcatcagctgtttaatttcttgttccgtttcgatatcgagatgcgcagtcggctcatccaaaagcataaccggccgcgtatccagcaatgcccgcgcgagcgcaatccgctgttcctcaccgccgcttagcgcccgtccgccctggccaattttttcatcgagcccgcccggaaagccggcgatgaggccggaaagccctgccgtccggaccgcttcctcgattttttcaagcggcgcatccggcgcataccaggcaatattttcccgtacggtccccgagaaaatatacggatgctgcggaatgtagttcacctgcttttgccattcggaaaaggacaaatgcggaacttccagaccgtcaatcctgatccgcccgccatccggcatggagaacccggataacaggtcaataagcgtcgatttgcccgaaccggagattccgatcacgccgattttttgaaacccgcgggcggtaaatgtgacatcctgcaaaatcgcccggttttcttccggcgactgtttttcaagcccttccactgttaatgtgctgtgttcgttccaaaccgggacgggaaaagaaagcccggttccaaagtcttctttttcggcaagcaggcggtggatcttctcgcccgcttctttcccgtccatcgtggcatggtaatcactgccgagatcgcggacgggcataaagtactccggcgcgagaattaaaagcgcaagggccggttcaaatccgatttgcccgttaatcagccggagcccaagttccacggccacgaccgccacggacaaagtcgcgaaaaaatccagggagaacgacgataaaaaagcaatcctgagcgtccggtttgtggcaatccggtacttgttgctgacttcccaaatggcttctttatggcttttgctccgccccaaaaactttagcgtcacaagcccccttaacgagtccacgaaatggcgggaaagcagctggtacgtttcccaccttgcttctttctgcttttgcgcggcaagcccgagcagaatcaaaaacccgattaaaatcggcatgacaacgagcagcgtaatcccggtttcaacgtcctgtgaaaaaacatacacaaggagaacagccgggatcgtcaggcacgcgataaagcgcggaataaaaagttccaaataagtacggaactctggaatgccctcaaggcaaagcgtcaccagattgcctgtgccatgcctgctgatggcgcgcggcccgatgcggaacagcttttcaacgagcaggttttggtaatggagggacgtgcggctggcaaaccggaacgcaacccgcgactttgcccactgcaaaaagtggcggatgagatgggcggcgaaaaagatgccaaattcggccgctgtttcctgccacggcacccctttatataaatggacaatcgcttttgccaggtatgccgcctgcacgataatggcaaccgattggaccatcgtcaggcatccggcaatgataaaagttttcaagctgcctttatactgcatcagatgtttatccatccgcaccagctcctctccggtatggccggccgttccgccatacgcagggcttttttgattcgttcaccggcatctttttccacctgcacggggcgattgtgccggattcatactacaatctgcgttttctccgcacccattcaaacggtgccggatgaaaaagaaaacacccggtttgcccgaaatccgctccccgggtgggcagcgggcggcaatctttaacccccgccccctgaacttttttaataatgcaattcatgcggtgtaacccgtttccggaagacatagtaactccaaattgtgtaagcgagcacgaccggcaccatcgtgcatgcgacaatcgtcatgacttttaacgaatacgggcttgacgatgctttatagagcgtcaggttgttcgccgcccccatggaactgatcagcacgttcgggaaaagcgcaacgaaaaacgagacggttacaagaattaaaatcaacccggttacggcaaaactcaatccttcttttttattccgcaagagcggatacagtcccagataaagcacaatggcaacggcatagactggaattaaaatggcgccccgtttcacaaacgcatctgtaaaaacagcggttaatatggcaaacaggacaacgacggcgccagcagccatatacattttcatcgctgcttttccggcacgttcacggatttcgccgtccgtttttaaacggataaacatcaggccatgcagatagacaagggcgacaaaggccagcccgccgacgatcgtgtaaaggttgacgatgtcgaaaaatccggcatgcatcgtcattgagcggtcaatcggaagccccttgatcatcccggaaaacagggcgccgagcaaaaacggcggcaggaggcttccaagcaaaatggcccagtcccaaatgcctttccatttgcttgcctggagcttgccgcggaattcaaaggcaacccctctggcaatgagtgcaagcagcaggacgacaaaggcaaggtaatagccgctaaaaagcgtggcataccagttcgggaaagcggcaaacatggcgccgcccgctgtcaggagccatacttcattggcatcccagaacggcccgatcgtgttaatgagcacccgtttttccgtctcatttttggcaaggaattttgtgctcatcccgaccccgaaatcaaaaccttccagaaatacaaatccgacaaataacacacaaacaagcacaaaccataattcatttaactgcattatacaaacctccttgtattgaaaggatccgatgcagtaatgtcttctatcggttttgcctgcgggccctgtttaatgacgcggataaacaggtaagccatcgccacggcaagcagcgtatacacaatcgagaaagcaatcagtgaaaacagcagctcgccggccgaaacattcggcgaaacgcccgcactcgttttcatcaggccgtttaccacccatggctgccggcccatttcagacataacccagccgaacgagttgccgatcgtcgggataaacatgcaagggaacagccatttcaagtaacgcatgctgttttcgatttttttcttccagacaaggtacaggccgatcaaactcatcaggatcataatgccgccagtggcaaccatgatccggaagctccagaacgttgtttttacaggcggaatataattgccttccccgtatttttgcgcgtattctttttgcagctcgttcatccctttgacggatccggaaaacttgccataggataagtagctcagcaagtacggaatttgcaccttgtattccgactttttatttttcgtatcaatgatgctaaacagtgtccatggcgcagggtccccggtgtttttccagattccttccgcagcagccattttcatcggctggacattaatgagataacgtgcctggctgtgcccggaaaaggcaaggccgagcccgctgagaagaccgacgataagtgcgatggcaacagaccgtttgaaaaaggccacatcttttttcctgatcaaattccaggccgaaacaccggcgatgaaaaacgcaccggtggcaaggctgccgaaaataatgtgcgggtaagccacctgcaatttttggttcaacagcacggcggcaaaattgttcatttcggcgcggccattgtgaattgtatagccgaccgggttttgcataaatgagtttgcggccataatccagagcgccgacagcatggttccgatcgagacgagccagatgcaggccagatgcagttttttcgggagtctgtcccaaccgaaaatccacaggccgatgaaagtcgactccataaagaacgcaagcagcgcttcaatcgcaagcggtgcgccgaatacgtccccgacgaacctcgagtaggccgaccagttcatcccgaattggaattcctggataatcccggtcaccaccccgactgcgaagttgatgaggaaaaaggttccccaaaacttcgtcattttcttgtaaatttctttctttttcaccaggtaaagcgtttgcatgacagcgacaataaatgccaatccgattgaaagcggcacgaaaatgaagtggaacaaggttgtagttgcaaactgggtccgtgccaatatgacttcactcatttcccaaaatcccctcctcttccatatttccgttactttttcattacacttatattatatttaatctttttatggtacagataggagctgtgtgacaattcggttaaaaactgtcgaatattatttgacaaatcatttttctggaaaaatattcttcccggcctattgactttttgtgaaagcgtgatcaaaagaggggtggctcattcgggcggctgggataatcgcgtccattttttccggtccaggtccgtaatttccttttttccagaacgctctccgcttcttcttttccaaaaagccgtaaaaaaagagcggctgcctccgctctttactgtttcatttcccgcctataggacacggcgaactgggcatattcgctttggggcgcgacttttgtcaggagcttaaaaagaattcggtaccgttctttcatggcccttttgatgacccgctcaatccgctcatcattcaggtcaagtaaaatttcttccatttctcttttcaacaaatactgcatttccagcagctctttttcatggacgacaagacctaacacccgcatgcaccctttctgttcatggtacgtctatttttaccaaatttaagggaaatatcacagcacttttccttgcataatcctgaaaaaatggcgcatacaataagacaagtgcagtttttaacgggaggttgaatcatgcaccatacgaaatcgcgaaactggaaaccgtatcttttcattgtcattgtctcgttttttactgccttattgatctatacccaaacgctggcgcagacggcaactttttcagcaaaaggcaccccgaaagccgtttttaaaggagaaaacggcattgcgttaacttttaatattggctggggcgatgaaaaagccgtccctatcttgaaaacgttgcagaaaaacggcgtaaagtccgcaacctttttcctgtcaggcgcgtgggcggaacagcacccggatattgtgaataggattgaaaaagccggatatgagatcggaagcctcggttatgcctatgtggattacacggatgaagaaccggctaaagtgcggcatgatatgcagaaggcacaagaagtgtttaaaaaacttgaaataaaggatgtaaaacttttgcgttccccgaccggccattttgacaaaacgtcattaaaaatcgctgaccaacaggggcttacaatggttcactggagcgtcaacaccgatgactggaaaaacccgggcaccgcaaaaattattgaaaaagcaagcacagccgaaaacggggatattgtcctgctgcacgcttctgatgccgcaaagcagacgaacaaagccctgccgcaaatcatccgtcacttgtcggataaaggaaaatttgtgaccgtttccgaaatgattgcaaacggcaaagcagaaacgaaagtgatcccttaaaggtcagggctcccggacaggttggatggcaacgctgaatcgggagcctttgtttctgctcaccgtaccatggctgataatgctttctgctgcggattgccgggatatggcgatggagggaaagatttctttccttctccaccgcgtatacagccagcttcattgctgtatacatttctgactatccatattataataaaggaagagattatttaaaaatcattcaacaatttgtcaagcatagtaaaaaagttgggttctaaaaatttatatagacatcgattaatagaatacaagtaaaatatcttgaagagcttggagtagatgccctttttgttgacgaagcgcaaatttaatcttggaaatgtatcgaaaaacaaaaaaggaggttcgttttacatttcttccatttaaacctaaaatcttacattattctgctgtagctgactaagtatattcgatgttaaaaagactccaacagggggcaaggtaccactaattacgggatatccggtaagagatttatcggttgtagcaatccaagttccatgctctcctgcttgtaaagaaggaggtttcataataagcctcccatttaaaacaaaatgtcgaattctaatcaagggatcatcaaatatagttaagttaccggaaaatgcggcaaaaggtgaatcaaatcttatttgattggtgttttcatcccaatatccattaattggaataggtgtgccacggaaattaaccgtaccaactatcctgttatctgtaatagagttaatgtttagtaaaccccaaacgattggtctaccatctatagcagcatggaggccccatactgacgggaatggaatactaaccattgtttgctgtgcagtttgcaatactaatctccccctaaatttaaagtttatgttctgaaggataaaggattagatatcttatttactatcctatataaaggaccaatccagtatatgcaccacaagctgaatatgtttacttttaacggttagaatctcatcctttcgttgaaaaatgcagatcattcaacgtttagaacaaaaaattatgttacaaaaaaattcctttacacagaggctccaagtcaagtccttaaacgcatattctgtggatacatataaacaatgataaagggtgcaacatatcaatgttttgttgttgatactatatataaggtgcatatagttgaatggtacgatttgtcttgaaaggctgaagctaaggtttcatcaggcaaacgagcctatcatacccatctctccaagtaaagtcctatgtttgtatacgttgttggattatcccatttgtgtgcaaagctaaccttaacgcagttattaatccatataactagcaggacaaattgtaggtgtattttgcaatagaaaannnnnnnnnnnnnnnnnnnnnnnnnnnnnnnnnnnnnnnnnnnnnnnnnnnnnnnnnnnnnnnnnnnnnnnnnnnnnnnnnnnnnnnnnnnnnnnnnnnntttactcttcagaactgagaagaagggatgtgccgggtttttcccgaaagcattgaataccaggcattgaaagatagctttttgtacgccttaatgccgcacttgcatccgggaaaaacggcctggcggaaatacggcttacaacaccttttcagtatgtcagctccctcctttccaacaggcgctccagcttctttttgacgcgttgtaaagcgttatcaattgattttacatggcggttcaattcttctgaaatttcctggtaggactgcccgtccaggtaaagggcgagcacttttctttccagatcgcttaacagctcggatatttttacttctatacggacatatttttcgcggattaaaatcaattcttcaggattggaaattttcgcgccggtgatgacatccatcaacgtacggtcggattcttcatcataaattggcttgtccagggaaatgtaagaattaagcggtatgtgcttttggcgggtggcagtcttaattgcggtaatcatttgccggttgatgcataattcagcaaaagccctgaaagacgtgagcttgtcctctctgtagtcgcgtatggccttatacagaccgatcatgccttcctggataatatcctcgcggtcggccccgatgataaagtaagaacgcgcttttgccctgacaaagtttctgtatttttggatcaagtaatccagcgcttcgctttcgccgttgtgtatccgttcaaccaactcttcgtcctgcatcgtgccatatctttcttcatatgctgcctcaatgttcaggttcacctgtatccccccaagagcattcgataaaagctattatacagtacagaattttcaatcgtcaaccgctcatcttttccccctgcgtaatttttcgaaaatttccatgacctcctggcttaacggtattcttgttgccggcttttcctcttgaattgattttacatttcttttaatcttttgttcaatcacttccactttggtcaacagttcgcgtgctgaaattcttaaagcgccctggccgaatatttgccactgctcagtaaaatcggatgtggccacataaatctgcgtgcggatgttattcagtttaatggccattttttcaatccgttcatctgccgtttcattttcttttgtaaaaatgacttccactttgtgatagcggtactttttttccaggcctttcaccccgtaagcatcaaaaacgacgatgactttgtcatccgtatagccctggtattccgccatgatctcaacaagccggtctctggcggcgccaaggtctttttgtttcaatttttgcagttccggccaggcgccaatgatgttatagccgtccaccagcaaaatattcattttattcaccaagcggatggcgcttcctgtaaacctcgtacatgagcaggccggcagcaacggacgcattgagcgaagtcacatgacctgccatcggaaggcggatcagaaagtcgcatgcttcttttacgatcctgctcattcccctgccttcactgccgatgacaaggccgagcggcagatccgcatccatttgccggtaatcggtcgtcccggaagcatcggttcccgcaatccacagcccttgctgctttaagccggcaatcgtttgcgaaaggtttgttacccgcgccaccgggatatgttcaatcgcgccggttgaagctttcgccaccgttgctgttaatgcgaccgagcgccttttcggaataatgacgccgtgtgcgccgaccgcatcggccgtccgtaaaatcgagccaagattatgcggatcctccaattcatcaagaatcaggataaacgggtgctcattccgctctttggcaagcttgaacatatcgcctgtttctgcataccggtaagcggcaacgagtgccagtacgccctgatgcgccccgtccgccacctggtcaatccttttcttcgggacaaattggacggccacttttctttcccttgcaagctccatcacctgcttcatggcgcctttttgtgaaccttccgcaatccagattttgttgatttcccggcccgctcttaatgcttccagcactgggtttttgcctgcaatatactcctggtccatcagcgcacccctcctttctggccttcgacaatgccaattgctttttcaatcagcgcttccatccgctcccggctgccggacaaataatggtagccgatcagcgcttcgaatgcagtgctgtgccggtatgtctggacatccgtatttttcggaaccgtgcccgacttcgcatttctgccgcgccggacaacagcggtttcctcttctgttaaaagatcttcgttcatcatctgttttaaaacttgagcctgcgccttcgctgaaacaaagcggatcgcttcccggtggaggcggtttggcttcgtttttccctgcaaaaggacatggtgccggatatattcttcatataccgcatcccccatataggcaagcgcaaggctgttcaattgtttcggatcaagggtgaccgtcataagcgtctccatctcaccccttggggcgtatcttccacaatgatattcatgcttttcagcttgtcgcggatttcatcagccagttggaaattacgcgcctttcttgcttcattccgtttttcaatcagcgcttcaatttcttcgtccaaaagcgcttcttcctcgagtttcaggccgagcacgccggcaatcgtttcgaactcttttataaatgcccggagaacggtttctgtcgtatttttcccccgcaagtaataattggcctgcttcgacagttcgaacaaaacagaaatgccgtttgccgtattgaagtcatcgtccatcgccctgataaactggcgatggagcgaacggacctgttccagccatttttcaccatcttccgccagatttgcactggattcgagccggtgctttacattttggtacgacgtcttgatccgttcaagccctgccttcgcattggcaagcagttcctcgctatagttgatcggatggcggtaatgcaccgacagcatgaaaaagcgcaaaacttgcggatcatgccgtttgatgatgtcatggacaagcacaaagtttccgagcgatttcgacattttttcgttatcaatattgatatagccgttatgcagccagtaacgagcaaacggtttgcctgtcaaagcttctgactgggcaatttcattttcgtggtgcggaaaagtcaggtcctgcccgcccgcgtggatgtcaatcgtatcgccaagatattttcttgccatggccgagcattcaatatgccatcccggccggcctttcccccacgggctgtcccaggagatttcccccgcttttgccgctttccaaagggcaaaatcaagggcgtcttctttcttttcccctacttcaattctcgcacccgatttcaattcgtcaatagattgatgggacaatttaccgtaatccgggaaacttctcgtgcggtagtaaacatcaccgtctgattcgtaggcatggcctttttcaattaatttttcaataaacgcaatgatcgtatccatattttccgtcacgcgcggatggacgtccgcatgactgcaaccgagcgcatcaatatcttcaaaataggcctgaataaaacgctcgctgatcaccggcacttcttccccgagttctttcgcggctttaatgagtctatcatccacatcggtgaaattcgacacataatggacatcataaccccgaaactccaaatagcgccggaccgtgtcaaatacgatcgccggccgcgcatttccaatatggatataattatagacagtcgggccgcatacatacattttcactttcccctcttcaagcgggataaacggctccttctttcttgttaacgtattatatatctgaatgctcatacgttcttgctccttcctttctcagttgttctaattccgaccgcaaagcctcgatttcctgctgcatgctgttcaggaggtccgcaacagggtcaggcagcttattatgttttaaatcttttttgattttgacgccgtcctggacgacgaccctgcccggaatgccgaccactgtcgaattgggcgggacatcctttaatacgacagaacctgcccctatttttgcattttccccaatcgtaatcgaacctaaaactttcgccccgcttgcgattaacgcattgtctttaatcgtcggatggcgcttgcccttttcctttccggtgccgccgagcgtaacgccctggtaaaccgtcacgttatcgccgatttcgcacgtttccccgatcactacccccatgccgtggtcgatgaaaaaccgcctgccgatttttgcaccgggatggatttcaattccggtaaagaagcggctgagctgcgaaatcacccgggcgataaaaaacattttctttttataaaaaaagtgcgcaatccggtgtgcccagatggcgtgaagaccggagtaagtcaagatcacttcaaaatacgtccgtgctgccggatcctgatcaaaaaccacttcaatgtcttccttcaaccgcttaaacatgtgctactcccctttcgtttgtttctttcccattccctgtccggttataaaatttctttcgctttgcatttccatcagccggatcggcaccgatcttttctttaacggagcctgccatttaaaaaagaagcgcctctgcaacggacagagacgcttcttgatcgcgcggttccactctgtttggcggcaggccttgcccgctgcccaactttccctgttaacgggcggccccgctgcatcctactggcgagcgcgttcagatacaggctcgaaggtgcatttcagaaaaggaggggcttaaaccactttcagccggcgatggttttctctttgaagcgtcctcttcctacttctccttctcaacgctttttcacacatccattttaaccatatcatatcctattttcgcaaaaatgttaacccgtgattctttcaaggcgtttcttcactttttctctgccgagcagttcgatcaggctttgcagttccgggccgtgtgtctggccgctaacggcaacacggatcggcataaacagctttttccccttttgcccggttgctttttgcaccgctttgattcctttttttatttcgcctgcttcaaatggttcgatcctgtccagttcttcaaggaatgcacggagcacttccggaacgtgttcttccgacaaaatcgcttttgcttcgtcgtcatatgtgatttcatccgtaaagaagagcggtttcgacagctcgacaatttccgcgccgtagctcatttgttcctgatagagggagatgagtttgcgcacccattgttcttcttcaggtgtccggttttccgggacgagccctgcttttacaagatgcggcaacgcaagctccacaactttatccagatcgagctttttcatatactggttgttcatccatgccaatttttggcggtcaaacaaagcgggcgatttcgacagccgttcggggtcaaaaatctggatgaattcttcccgcgaaaaaatttcttcctcgcccttcggtgaccagccgagcatggcaataaaattaaacaacgcttccggcaaataaccgagttccgcgtactgctcaataaactggatgatgcttccgtcgcgtttgctcagttttttccggtgctcattgacaatcagcgtcatgtggccgaataccggcggttcaaaaccgaatgcttcataaatcatcagctgtttcggcgtgttggaaatatggtcgtccccccggagcacgtgggaaattttcattaaatgatcatcgatcgcaaccgcaaaattataagtcggcatcccgtcttttttaacgatgacaaagtcgccaattccgtccgattcaaaagatacttcgccttttacgatatcgttgaacgtatacactttgccttccggaacatggaaacggaggctcggtttccggccttccgcttcaagccgcttcctgtcttcttctgtcagatggcggcatttcccggaataacgcggcatttccccgcgtgcaagctgggcttcacgttcggcttccagttcttcttccgtacaatagcatttataagccagcccgcggtcaagcagctcttcataatattttttataaatatcgaggcgttccgactggcggtaaggcccgtattcgccgccgacatcaatgctttcgtcccagtcgatgccgagccatttcaaatatttcagctggctttccacgccgccttccacattccgcttctggtcggtatcttcaatccggataatgaactttccacctttgctgcgcgcaaataaataattgaataatgcggtacgggcattcccgatatgcaaaaaaccggtcgggctcggagcgtaccgtactctgatttcgtttgccatgtcgattctcctttaaattgtcgctttttgtcttattttattgtatcaccgtctgaaaaagccgtaaaccggtggctcgttccggcccggcggatgaaagatgttttacgtgatgttaatcacacatcttgcaggcaaaatctctgctgttatgcttgttccagcagcattacaggacctaaaccgcctggcttgtcccgatcgcgcccactcttttgcagctataccccaactatacttgttccagcgaaaaacgggttcccgtaaacagccgcccggctccgttacacccttttcggtgaaacatatgcaggccatccgccggttaatatgggtccagcaggcagtgcgggccctgaactgcccggcttgtcccgatcgcaccattacagcttacactggttaagcctgctccagcagtactgccgcctgcgcagcaatgccttcttcacgcccggcaaagccgagtttttccgtcgtggtcgccttgacattgacctgcccgttctctgcttccaaaatgcgcgcgatcgtttcccgcattttcccgatatagggcgccattttcggcttttgggcaataatcgtgcaatcaagattgccgagcttgtaccctttttgtttcacaagccgaaaaacatgcgccaaaagcgccgcagaatccgcatctttaaatgccgcatctgtatccggaaaatgccggccgatatccccttccccaatggccccgaggcaggcgtccgctacggcatggagcagtacatccgcgtcagaatggccgagcaaacctttttcatacggaatttcaactcccccgatcatcaggggacgcccctccccgaaccggtgcacgtcaaagccttgtccgatcctgaacatcttcatcctcccccctgcttttttaaaatcgcttctgcaaaatataggtcttccggtgtcgtaattttaatattatcataacttcccggcacaatatgtacagcatggccgatccgttcgaccagcgaggcttcgtccgttccgagaaaaccgtcccgttccgcggcttcatgcgcttttttcaagacagacgtgcgaaaagcttgtggcgtttggatctgccacaagctgctccgctcaatcgtctcggttacaatctggtcttttgctcttttgatcgtgtcttttaccgggacagccgctatcgccgcccctttctccccggccattgccgccagtgctgcaatcaatccggcgccaataaacggccttgcaccgtcatgcacaagaatgacgctgcagcttccggcaagttccagcccgttccgcacgctatattgccgttcagaaccgccgcgggcgaatactattttttccgagcggggtaaaatacgcttcatctcttccaaatcatgcggctgcacgggaagtatcaactttttgcaggacggatcagccaaaaaaacttctgctgtaaaagcaatgaccgggcgcttgttcagttcaagaaataatttgttgaaccctgcgcccatccgtttccccgatccggctgccggtataatcacctcataatctgtcaaatccaatctcccccggcatcgcgtttaaacctcccgcggcccgggccgcgggtgttccagctccattataacgctttttcgagcagcttcggcttggcaaaaatcatccggcccgctgaagtctgcaggacgcttgtcacaagcacatcaatgcgtttgccaatgtaatttttgccttcttcgacaacaatcatcgtgccatcatccaaataggcaatcccctggtgatgctctttcccgtctttaatgagctggacattgagttcttcgccggggagcacaaccggttttacggcgttggcaaggtcattgatattgagcactttgactttctggaattcacacactttatttaaattgtaatcatttgtcacgacaatcccgttcatcaattttgccagtttaatgagcttgctgtccacttcctggatatcttcaaaatcgccttcgtacatttgcacttcgatcggcagttcattctgtatccggtttaagatatcaagcccgcgccggccccggtttcttttcaaggcatccgaagaatcggcaatatgctgcaattcttcaagcacaaagagcggaatcacaatcgggccgtcaagaaaaccggtctggcaaatatccgcaatccgcccgtcgataacaacgcttgtatcaagaatcttcacctgttttccaggctgcggatgcccttcttgctctgtcccgcctttccgcctgtgctgccggctaaaaaacaaattgaaaatttcttctcttttcttaaaaccgacctggaatccgatataaccgagcaataccgtaagcgtaatcgacacgattgtattgacaatcggaattccccggaccggaatgcttgccagataagcaataatcaggcccagcacaaggccaaaggttccggaaaaaatttccgtcatcgggacttttaccagtgaatcctcaaaccaatcgacaaaatcaacgatataatgaatggaccagaaagtaataagataaaagataatagcccccaacagcgctgaaacatacgggtttttgattaacacataatccacattcacaagtttgtaaaaatcaggcagcaggaaaacaccgagcgtgccgccaatcagcaccaaacaaatttgtataagccgtcttaacaacatgttcacctcctttatacattataaacaaaaaatatggtttaaaacgtttgccttcgtattatttttccctgccgagccgtttaatcgccgcggttttctccgggcattttcaggcttcatgcacatcccctgctttcttttaaaatttgtatcctgccagccgttgtcttttctgcctttacatcataacggatcctgcaaacgcggattcgcggcagttgtttgcttatccagcgggttccgttttttcccacgtttgccttcacttcccggttccttcacgcactgatccaaggaacacaagaaggcacggaagtttgttccccgtctcatcctccgagtgccgcttttaaagcttcctggatggtagcgacgccgatcacttgaatctcctttggcggcgtccacccacccatattatttttcggaatgatcgcccgccggaaaccgagctttgccgcttcctggacgcgctgctcaatgcgggacacccgcctgacttcccccgtcaacccgacttctccgataatgcagtcatccgcatttgtcggcttgtcgcggaaactggatgccacgctgacggcaactgccaaatccactgccggttcatccactttcaggccgccggcaacttttaaatatgcatcctggttctgaatcaaaaggccggcccgtttttcaagcaccgccataatcagcgtgacacggttataatcaatcccggatgccatccgccgcggcatattgaaaaacgtcggagccaaaagcgcctggatctcgacaagcaccgggcgcgtcccctcaatggaagcaaccacggtagaaccggctgcaccttttgtccgttcttccagaaaaatttcggaagggttctggacttcttccaaaccggattctttcatttccaaaatcgcaatttcattggtcgagccaaagcggtttttgaccgcccttaatatccggtaggcattatggcgttcaccttcaaaatacaggaccgtatccaccatatgttcaagcacgcgcgggccggcaatggagccttcttttgtcacgtggccgacaatgaagatggccacattttttgtttttgccgtccgcatcagctgtgcagtcgtttccctcacttgcgacacactgcccggcgcagactggatttccggatggtaaatcgtctggatggaatcaatgataacaaagccggggttcagttcatctatcgcctgctggatcacggaaaggtccgtttccggcagcacataaagatggtcggtatggatgtttaaccggtctgcccttaatttcgtctgtttcgccgattcctccccggagatatacagtacatttaacccgtgctttgccagttgtgatgacacttgcaaaagcagggttgatttgccgatcccaggatccccgccgatcaaaacaagtgacccggcaacaatgccgcctccgaggacacgattcagctcgccaaaatccactttcgtccttttttcttctttagactctatagacgtaataggcgccgctttggtttcatttccgggctcaggatgtaaaaaaaagcccctcctttttggcgcctccgcttcctccaccatctggttccactggttgcattgcgggcactttcccatccattttggcgactcgtagccgcagttctggcaaacaaacttcacggttttttttgccatcttaaacccctttccctaatatctatgtgtataagtgtaaacaaagtatcttgaaatttaattaaaatcgtataagaaaccgctatgtgaaaaaaagggtacaatcgccaataccattgtacccttcctgcttccggcattaagaattggacgatacagcttccgactccgccacactggcaaaagtaaattcgccgtcttttacatcgaccaataccttttgcccttcttttatattgcctttcagcatttcttccgaaaggcggtcttcgatgtttttctgaatcgatctgcgcagcggccgcgcgccgtattcaggatcgtagcctttttccgccactttttcctttgcggcatccgtcagcacaagttcgatatgatgctcttttaaccggtccgacaattctttcgccatcaatgtgacaatttcgttcaaatgtttcttctcgagcgaatggaacacaatggtttcatcaacacggttcaaaaactcaggccggaacgcttttttcagttcctcgagcactttgtccttcatgtctttataatcggcctcgacggtatcctgaatggtgaagccgacgctcttgttgcgttttaaagcatctgcgccaacattcgatgtcatgatgacaatcgtattgctgaaatcaaccgtgcggcccttggaatcggtcaggcggccgtcatccagcacctgaagcaaaatgttgaaaacgtccggatgcgctttttcaatttcatcaagcagcacaaccgaatacggttttctccgtaccttttccgtcagttggccgccttcttcaaaaccgacatatccaggcggcgaacctacgaggcgggaagtcgaatgtttctccatgtattcggacatatcaatccggatcatagcgtcttcatcgccgaacatcgcttccgcaagcgcacgcgccagttctgtttttccgacccctgtcggcccgaggaaaatgaaggaaccgatcgggcgtttcggatcttttaatcctgcccgtgcacggcggactgcttttgccacagcaagcaccgcttcttcctgcccgatcacacgggaatgaaggatttcttcaaggtgcaaaagcctttccgtttcggtttgcgccagtttcgtcactggaactcccgtccagctcgaaacaacaagcgctatatcatcgactgtgacttcgctgttttcccggccttgttttgccttccagcttttcttcgtttcctccagctgttcgcgcagtttctgttcggtatcccttaacgcagccgctttttcaaattcctggctctggacggctgcatctttttccttgcgcacctcttccagtttcaattccaactctttcaaattcggcggcgttgtaaaggaacggaggcgcactttcgatccggcttcatcaattaagtcaatcgctttatccggcaggaaccggtctgcgatatagcggtccgaaagttttacagcggcttcgatcgcctcatcggtaatcgagacgcgatggtgtgcttcatagcggtcgcgcagcccttttaaaatctggatcgactcatcaatcgtcggctcatcgacctggatcggctggaaccttctttccagtgccgcgtctttttcaatatatttccggtattcatccagtgtcgtagcaccgatgcactgcagttcgccgcgggcaagcgacggttttaaaatattggaggcatcaatggccccttccgcaccgccggccccgattaaagtatgcagttcatcaatgaaaagaatgatattgccggcctggcggatttcatccatcacttttttcaggcggtcttcaaattcgccgcggtattttgtgccggctacaaccgtacccatatcgagcgtcatgacccgtttgtcacgcagggtttccggcacttcattatggacaatttgctgggcgagtccttctgcaatggccgttttcccgacgcccggttccccaatcaggacagggttgttttttgtcctccggctcagcacttcaatgacacgctggatttctttgctccgcccgattaccggatcaagggaatcttcccgtgcgatcgctgtcaaatcgcgggccaggctgtccagtgtcggtgtgctgacgctggccgccgaaccgccctgcacggatgcttcactgttgcccaataattggagcacctgctgccttgctttatttaagctgacgccgagatttgtcagcacacgtgccgcaacgccttcaccttcacggatcagcccgaggagaatatgttccgttccaacataggagtgcccgagttttctcgcttcatccattgacagttcaatcacttttttggcccttggcgtgtagtggatcgtttgggaaatttcctggccgttcccgatcagggtttccacttcttcctggattttttcggcgcttaaacccaggccgtacagcgcttttgctgcgatgccttccccttcgcggacaagtccgagcaaaatatgttccgttccgatattgttatgtttcaggcggattgcttcttcctgggaaagggccagcactttctgggctctctctgtaaatcttccaaacatcatctgtcattcctcctgttcatttggtctcctcaagcctcaaacgttctcttatcagtgtagccctccggatatccctttcatacgggctgagcgctcttccggcataaagctgtaaaaatcccggctgcattaaaatcatcaattcatttaaaatttgtttcgaaatgttttgaatatagcccagatcaattcccagccggacatcggacaaacaacgggccgcttcttttgtttcaatgatcctgctgttttgcaggacaccgagcgaacggtaaaccctgtcttctaattgtatgtttgaagtttgcaccaatgcttcccttgccgatctttcctgtgtaatgatctgccggatgacactggttaaatctgagacaatgttttcttccgatgttccgagtgtcacctggttggaaatttgaaaaatatttccgatggcttcgcttccttcgccatatattcctcttaccaccaaaccaagctgatgaatcgccggaatgatttgtttaatttgctgtgtcagcacaagccccggcaaatgcatcatggccgatgcgcggatgcctgttccgacattcgtcgggcagctggttaagtaaccgagcgtttcatcaaaagcataatcggccccattttcaatcaggtcatcaagctgattggctttctgaagcgtttcatgcaattgaagccccggagaaagacattgtatgcgtaaatgatcttcctcatttatcataatactaatatcttcgccgcttgacaaaataactgccccgtcacccgattcttcggcaagctgcgggctgatcaggtgtttctccacaagcacccttttttcgagcggttttaattcatccatttttaaaaattcaacctgcagttcagccggaaaatgattccgggcgatatcctggattattttcataatttcccttgcttcctcggtactaaacaaggacgggaaccggaaattttttaaatttcttgccagacggacacgtgaggtcagtacaatttccgattcaggcccctgctcgttcatccaggaactggacgcttcgtgcaaaaaatgttccaaagacattactgttcccctcctttagcttgagaagaaccttcaagtgcgcgaatttgatcgcggagttctgctgctttttcaaattcttcctggctgatggcttcctgcaacgccgcctttagttcctgcagtttcttctttgtgtaaatggcaccaccaatccgtgccggtatttttccttcatgcgcaacgttgccgccgtggagacgctgcaaaatcgggacaagctggtgctgaaacgtctcatagcaatgcgggcagcctaaccggctcgtatttaaaaaccgggtcaatgtcatcccgcaatggctgcagcgaagcacatccgggtcaggcgctgtttcctgtttgaaaagttggatggccgggtcaaaattaaaaaggcccgcgagcaaattatcgaaggaaaagctttttccccaatccgatgaaaacttttcccctttctcctgcgcgcacttttcgcaaagatggaattccgttttcacaccgtttataatttttgtaaaatgcatggttgccggcctttcattgcattcctggcaaatcacagcatactcacctctgtagttacttgtattttaaggttgttaacatggatttcaacattctggcacgcaattcatcccgttccggcaactggatgtagagcacggagcggtccatcacgctgagcatgatttttgcctcccgccttgagatcacctcttcttcaacgagccggagaatgatggcttccgcattggactgggagatgacattgccgatatgcacgagcagctggtcaatcagttccgcatcgctttcaggccgcactttcatgatccggatataaccgccgccgccccttttactttcaacaatataccctctttcaatcgtaaaccgcgtattgatgacataattgatttgtgaagggacacattggaacttatcggcaatctcattgcgttttatttcaagaatttctttttcattcagttccagaatccgttttaaatattcctctatgatatcagatatatttttcatcaaagccacctcctgacactgtcttttgactttgactatatttgactataattatacaggattcccccgcaaaaatacaacagaacaacccgcccaattttaacttttcttactccgattttcaaaaaattgctgatttcttttatcttttccctgattgcgctttaaaaacccgccaggccggatactgtcccgcccttccaaagccggcatcggtttgaaaaaaatggattaccgaaacctccatttttgaaatgtgaaaaaccgcagacaaatcgcctgcggttttgatttggcccggcaacgtcctacttttattttgccatacacagtaggctataatattttgctatttattatacggaaaatgaattttgtccagcgtttgaataccttcgttacaggagtgattccccataaaatatggggattactaatttgtattagggttatcagtcaaaaattattaatagtgattttctgaagccatggcaattgcctttgtctcatgaacagtaccatatggatgttgaggtggtgcataaatggagtataattttattggtttattacctgtgttcgttagattatgccatgttcctgcgggtatcacgattacatagtcgtcatatacattggcttgaaaatcgtatattcctttatttttccccatttgaacaagtccttgaccatcttcaatacggaggaactgatccaatgttgggtggatttccaatccgatatcttctccaacaccaatattcattaaagtaacctgcaaatgatttcccgtccataaagctatgcggaaattgttattcttcttggcggcctgttcaatattaattacaaatggctgcggcccgaaatcctttaatatattgcctctattataaggattttcattatcgcccaaattattgttccagttataataatggggattccagtcgttacaccaccatgtacagatttccagtgaaattgggaatattagaaagcccgcttttcacttcaacctttatcattactgatgcgccgttctctccttaaatcacagaatcatttaaatatatagtaatttcctggaattcctttgaagatgatatgttagaagcaattgtagccaatctggttccatacgggccaacaaaagttgtacaaaaaatgtaaagcgggtttgcgcgattgtattgcataatgaaaggggaagggggcgttacaatggaaattctggataaaacacagcaggtcattgatatgcttgaagcagatatcatgcatccagattatgaaaaaatcgcaaaaattacggggattcctttggggctttaccaacgcatttttacgtatatctgcaatatttcattggctggatatgtacgcaaacgaaaactcacgctggcggctgagatgctgctttctaaaaggaaaaatgtaacagaaacagcaatggagtgcggctatgagagcagttccgccttttcaagggcgttcaaggaacaattttcagtgccgcctgccatgattaccggtgacatttatcaagaaaaagcttttccgccgctttcctttaaagacaatgacacctattacgtgatgaaaggaagaagaatgatggcagaactggtaaaaatcgaatacatgacggcagaagacgtgctcctgatcggcatcagcaatcaagattttggcgtcaccaccagcgacctgtgggaagttttttgggaacggggatttgacaaaaagcttcatgaacttcatgaatacagcgtaggcatggaagactgcatcggcctcggttatatgaccgattttgcaaacgactccgggcttggcgaaacgtatatcatcggcaagtattttaaaacaggaaccccggtccctgaaggcatgacggggaaaatcatcaaaggcggaaccattgcaaaagcacagattggcgcaaagaaccttgacgatatcatcagcaacgcatttatcctcatttccgacatggtacaaaaaaacggctatacacttgactatgaacatttctactgggtggaattttacacggtcagccgtttctgcaacccgcttgaaaacggcgccaaacaggtcattcttgattttcaaatgccatgcaggaaaatatgataatggaactgaaaatcgttgcggctgacccgcttggggaaggaaagaaacagaatgtgttaaaatgaatggtgtgaatatgatcccaatgggtttgcaggtgaattgaaagatgaagcaaattttcagcacggtggtccaatttcgcggatcacatgaaaaattcggttatatgcaggggcttgcattaaaagaatcactttctgtccaaaaccgcgacaatcaatggaaagtcagaaaaccgcggtttgtcatcgacctgaacgaaacgaaagacgccatcacccgctttgcacccggaatctgggaagagttgcgcggattgcaagaagcgctggaatggccgatggaaaaagttttgcaggaatttggcggctaccgggtggactgtgcaaaatcaggctgctcgattttaacaggcgatggctatcttatccgcaactatgattaccatccaaaaacctatgaaggccgctatgtcctgtaccagccaagcgatcagggatacgcgattgccgggccgagccagcgcgtcaccgggcggatggacggcatgaatgaaaaagggctcgccatcggctatacgtttatccatcgaaaaagtcccggcgacgggtttatttgctgcatgattggcaggctgctattggaatcatgcgcaaatattgacgaagccgttgccctattaaaagaaattccgcaccgccattcattcagctatgtagtttacgataaaagcggggaaaaccggattgtcgaagcatctccgcgcgcggtcgccgtgcggaacggaaacacttgcaccaatcattttgaaaccctcggcaaagaaaaccggcatcatctcaacgattcgatgcgcagaaccgccattttggaacaggaaaaagggcatctgtccagcgcccgggatgcgtttcaattattaaacagccgggaaaaaggcgttttttcagaattatacagcagctgggcaggcacgattcatacttccgcttacctgccgaagcaaatggaagcctggttcgctttaggcggggactgcgagccggtgaaaatcgactttgataaatggctgtcaggagaagacttgcccattgaaaagatcaccggcgaagtggatacggatattcccttcctccatatggacaaaggggccgactggtttcgaaaataatcaaaatagcggccatggcagcaggaatccttgccggaaaaatcgctccggctgcgaaaatggaatcatcaggcgccctgggtcgtatggagcaaaaaccatggactctttttttcatgggccgccagcattggaagcgttcccactgtatcgtgtatattgtactccagctgggaaaattttatttatgcgtttactgtccaattggcagaggaacgagaaagcacggcaaaaaccggatacccaatcaggttccggttttaatttgccgtcttttcttctgagatcttgcgcaatgctaccttttcctccttttccctttgggagcgctttaaaaaatacggaagcgcaagcagctgataagcattgcagatgagaagcgggaaaagcataagataaagcgaggttatgctattggcacgcaaagacggcacccattcgagaatggtcactgccaccatgaaaaagaaggcaggaataaaagtccttgcacttttcgcctgctttgtcttagcagctgccgccgcgagcgcggacacaaggatcagtgccgcaaacagcaaggactggcgggtatccgcgcggaagtacacaaaatcgaacagtacataacaggctgctacgagctgaacggcctgccaaacaagccgcgaacggaaaatatcaagcccgagctggtgcacggttaaccaggcgaagaaaccgacctggctgacaagactgaaaatcaagcccaaccccgcaaaccagaaaaacgcgccggcgatggataaaagatccgcccgcgcaaaataaggtgccatttccggccagcgtacgaaaaacccgagaatctcggctgacacccctccgattgcaagagcggcaaaaaagaaacgaacccagttccggcttgtcaatccccatccccctttgccattaaagtacctctattgtaacagagaataattagaaaaatccagcacatcacgccggcttttcccaaatgtaccgttttaccaatacgcacgatgaagccggtttttgcagacctgccttagcgggaaaaacttccactgcttttaagcctccccgccgggcgcataatccgaaaagaacttcacatattaaagatagaatgaagaagggagccaaaagcatgaaaccaagaaccgttttgctcctgatcagcctttgcgctgcccttacagcctgctcgggcgaggcttcaacaggcgggcaagcggattataaccagacgaaaaaaatggtcattgacatattgaaaaccgatgaaggaaaaaaagcgctgcaggacgtgatcacaagcgatggaatgaaaaagaatttggtcattgacaaggcgtacatgaaagaagcgatcgaacaaacattaacttccgataaaggcaaggctttttggagagaggccatgcaggatccgaaatttgccgccgcggttgcagacagcatgaaaaccgaaaacaaagcgctgttgaaaagtttgatgaaggatccggattaccaggcgatgatgatcgatattttaaaagacccggcttacgaaaaagaagtacaaacgatgctaaaaagcaaagaaatgcggaaaaccatgcagggtgttgtcattgatacgtttaatgacccggcttttaaagcgaaaatggaagacagtttactgaaggcagccaaagcaatgaatgagaaaaagtagcggcggggcgggttccgccgcattttcttatcatggaaaaaataaagttgaaaccagtggcggccgtttgtccatttagcagggcctaattggacatttcaacccgccctgcctgctcttttgtccttcatcccgcttatgaaggacatttcaacctgcaactcgcaaccttttgtccttcatcccgcttatgaaggacatttcaacctgcaactcgcaaccttttgtccttcatcccgcttatgaaggacatttcaacctgcggctcgctgccttttgtccttcatcccgcttatgaaggacatttcaacctgcagctcgctgccttttgtccttcatcccggttatgaaggacatttcaacctgcggctcgccaccttttgtccttcatcccggttatgacggacatttcaacctgcggctcgccaccttttgtccttcatcccgcttatgaagggcatttcaacctgcagctcgctgccttttgtccttcatcccggttatgacggacatctcaacctgccccgcctgctcttttgtccaattagccatcctatcgggacaaaacacaccgccgacaccgatcttttgtctatcctgaaaatatacgccggctggttttcattcttctgctggtgccgctgttctgcggcatgggcgttcattggatcccctattgagacaaaacacacggccagcccaattggacacacctttccaaatgccgcttccattcctatggggacagaggccgcctgttttcctttcattatgaaaaagacggcaaggcactcacaagagaagtgtcttgccgtcttttttcggcagccttgcggaggggcgggcttttcacgaagtggatgctccgccgaaaattcctcctctgtttccggctgcttcaaaactgcgggtttttcgcgaaaggaaagcttcactttttcaatttgtccacaatcttttgggcaatctccctgtaaatctgcccgagccggtggtcttcggcataaatggacggcgcgaaatcatgttcattccagtccggctgctggagcgggagctggccgagcacttcggtccgcaattcttcggcaagtttttccccgccgccgcggccaaatacatactcgcgttcgccggtcaccttgctttcaaaataagccatattttcaatgacaccgagcaaattgtgttccgtccggagtgccatcgcgccggcccttgccgcaacaaaagccgcagtcggatgcggggtcgtcacgataatctcattgcagcgcggcagcatcgaatggatatcgagcgccacatccccggtgcccggcggcaagtccagcagcaaataatcgaggtcgccccattctacttcatggaagaaattgttcagcattttgccaagcatcggcccgcgccagataaccggcgcattgtcttctacaaaaaaacccatcgaaatgaccttgaccccgaaccgttccaccgggataattctttcgccgcggacaactggacgctgcataatgcccatcatgtccggcacgctgaacccgtaaatatcggcatcaatcaggccgacctttttcccgaggcgggcgagtgcaaccgccaaattgacggaaacggtcgatttcccaacgccgcccttgccgcttgcaatggcgatgaattccgttttggcggagccgagcggatttttgttgtcttcctgcaacaaatcgcggaaccggccgagcgtctctttcggcagttcgccgaagcggatgccgactgtgttcgcgccgatccccttcaatgctttcacaatggccatctgcagctgcagctgttcgcttgtgccggttttggcaatcgccactttgacactgacatgctggatctcttctttgattttgatttcgaggatcccttttgtttcttccagcgttttatgtaaaaaaggatcttcaaacccttttaacacgtcgtaaacctgttgttccgtcaacattttctacaccatccttaaaatgaagtcgtttccagcttgattccagtataccatacaatggcagtgttttgcgctggaacggctccggatgcttgtcagttctttaagtccttttcttttgtaaagtagcgcataatcccttcataaatagaagccgccacctttgtctggtacgcatcggattttaattgctcccgctccccgggattggacaaaaacccgatttccacaaggcagcccggttttttcgcatgcttcagcaaatacacattggataatgttttggaagcccggtttgtattttcgagattccggaccagctccgcctggataaacgtggcgatccttttattttcaatcatggtcggggcgtaaaaagtctgggcgccgtgccactgcgattgcggaatagcgttcagatggatgctgataaaaaggtccgcttccgacgcgttgatcagggaaagcctttttcttaaatcctccactttgcggcggctgtagccctttgtctcgttatcagcaaggtctgtgtccgtttcgcgcgtcataataacaagcgccccctgctgctgaagatagtctttgattttgctcgccacactcaaggcaacatctttttccagcacttcatctcccgttgccccgccatccggccccccgtgccccggatccaaatagatgattttcccggaaagcggcagattccacgggcgccacgtatctttttggaaaaactcaaactgcacaagtaaaaataaaagggtgacaccaagcagaaaccccgcaattttgattttccgtttcatcacaatctccctctccctgtccttactgaaaagttatgggacaagggaggaaaatagaactggaaaaaagggagccgcaaacgggcatcccctaacgaagccgcagtttccgcctttgttcgccttttttaaagccgtaagaccaaaagtagtcggcaaactgctcgcatgtatagtaaatggactcctgcatcgtatcattgccgaatgtccaataaagccaaaaattatacagcgtatctgtaatatgctttaattcggtttcgcaccgtttctttgcctgctcggctggctctccgtaatacccgaaccggctgtaatggccgcctaataaataggcctcaatggcgacatcgtaacacccttcttcgatcccctgctccatccacgctcccccgttgatccggaacgaaccgaaatgggactggaagcttttcttcagcacttcaaccggcagttcgcggagcaaattgcgttccgctttcatttgcctctcccgtcttttcgcagacagggtggtaatgacttcattcatctctacccactccttaccggtattgtacgcgggtgtagaggcgtcgatactttataatgatttccaaacaaggaaccgatatcgcaacatgggcgcgcgctttaagccaacacaccgctcaggggcacgcatcctttttttcagtatgctccggcttctggtcaaatccccggtcatcaatccggcatgcctcaagcgggatgacttttgtccgctttacgagcttgtagccgagccacatgatggcaaaaagcgggatgccgagatacgcggcaatggcgctcatccagtcgatacgaccgccgaggaatgcctgataatcctgcgcaagaatgacgatcacgccgacaatcagcgcaaaaattgggccgaacgggtaccatttcgcatggtaagggaggtcgtcaagtgaacgtccctgtgcgagatacgctttccggaaacggtaatggctggcggcaatcccgagccagaaaataaagcccgtgacgcccgctgcattcaacagccagatataaatggcgccgtccccgaatgcggatgcgagaaatgcaagcgcgccgacaatggtcgtggcaacaagggctgcgaccggcacgccgcgtttgttcagtttgccgaaaaacttcggcgcctggccttcatgggccattgcatacaaaatccttgttgaagcatacaggctcgagtttcccgccgacagcacagccgttaaaatgaccgcattcattagggatgcagcaaacgcaagccccgcttttttaaagacaagtgtaaacgggctcaccattacatccgtactttgcaaactttttgtcgtataagggataatcagcccgatgacaagaattgcaaggacataaaataacaaaatgcgccagaaaatgcttttgattgctttcgggacgtttttgcgcggattctcgctttctccagctgcaacgccgacaatttccgtcccctggaatgaaaatccggctgtaatgaacacgccaagtacggcaagcgcaccaccgtggaaaggcgcatccccgattgtaaagtttttaaagccggccggtgccccgcccaatatgccaaatatcatgcataagccggtaacaataaaaaggataatggtcgccactttgacaaaggaaaaccagtactctccttcgccatagcctctcacggacaaaatgttcaaaagaaaaatcacgagcaaaaacaggccgctccacaaccagctggggctgtgcggaaaccaaaatttcatgaccagcgtcgatgccgacagttccgctgcaagacaaatggcccagctgtaccagtaattccagccgagcgcaaaaccgagcgccggatcaataaagcgggttgcatacgtactgaatgccccgcttgtcggcatgaatgaagccagttccccgaggcttgtcataataaaatagaccatcacaccgataaccaaataggcaagcagcgctccccccgggcccgcctggtaaatcgcggcgccgcttccgagaaaaagcccggtcccgatcgagccgccgagtgatatcatggtcagatgtcgtgcctttaaacgccgtttcaggccggatttttgtgttgccatcgtatgttcatctccatttatctatcatacgcatctggttaaaataaatcacaacgtccataccatagcacaaaaaattccggatgaaaacaggattttgcatatttccagcattttgttgcataatcttacatacctatgtagaaaaacgtgcagcaaggttttgcacctgctgcacgtttgccgtttataaaaccggctgcttttcgatgtaccctttttcttccaaaaagcggatcacctgcccgacagcctgttccagcggctgtttgtcggtttccacgacaagttccggatgttccggggcttcataaggggcatctataccggtaaaattttgtatttccccattgcgggcttttttgtataagcctttcgggtcccgctgttcacatgcttccaacgggcaatgcacgtaaatctctacgaattcattatcttcgaccagttcgcgcaccatgtccctgtcagcacggtacggtgaaatgaacgccgtcagcaccattacgccggcatccacgaacagttttgacacctctccgatgcggcggatattttctttccggtcttccggggaaaacccgagatttttattcaacccgtggcggatattatcgccatcgaggatatacgtgcggatcccccgcctgtggagttcctgttcaacggcgacggacagcgttgatttccccgcaccggataacccggtaaaccagaggactgcgctagagtgcccgtttaacctccggcggtcttcttttttaatttgggtttcatgccatgtgatattggttgctttcgccatgcggccggttccctccttatgatttgcggacgtttaattgtgcactttcatccctttgatcagcacttctgccacttccggccgggaaaattctttcggcggtttttggccggcgcgcagcatttcgcgcacttttgtcccgctcaaatgaatatggtcttcttttccgtgcggacaggttttcgttgtggccatattgccgcatttcgtgcagtaaaacgcatgctcaaattttaaaatggtgatgcccagttcctgctccacagtgctgatcagttcctgtgcttcatacgtcccataataatcgccgacgccggcatggtcccggccaacaatgaaatgggtgcagccgtaatttttacggacgagcgcatgcaggattgcttcccgcgggcctgcatagcgcatggcggcagggtaaataacaaggcgcacacggtcttttggataataatgtttcaaaatcacttcgtaactttccatccggatatccgccggaatatcatcgctttttgtctcgccgacaagcgggtttaaaagcagcccgtcaacgatttcaagcgcgcttttctgaatgtattcatgggcgcggtggaccgggttgcgcgtctggaagccgacaatcgttttccagccgagggatgcgaacaatgcccttgtttctttcggatctttataataagcggcaaactcgtcatgattcgggcggtttaaaagcgtaaccggccctgcaagatacacatccccgttttcatataagcgtttaacaccggggtgcgccgggtcggttgtcccgtacacgagccttgcttcccgttctttttccactgtatacttttcttccagtgtgagcgtgccgtagatcacgccgtctgcgccttttaatgcgagcatttctccggtttcaaacctttccgcttcctcttctgttacgggaagcgtgatcggaatactccagataaggccgtttgaaagccgcatattttccacaaccgtttcataatcctgcttccccataaacccggtcagcgggctgaatccgccgatgccgatcagctccaagtcggagatgctccagtcggaaacggttaatgccggtaattgttctgcctgttttaaagcttccgcactgtggttttcccggtttaccaatataccgccgtgcgggatgctcgttgaaaaagccatgttccaatttcctccactcgtttacatttttcctataaaaacaattggaatacttccgtaatatttattttagcattaaacagattatttttgcatttattttttgcaaattttgacggatcacgggtgagcgcgctgtcctctttcaaatcgcttctcgacacgctcatgataggctccggactgaaagacttcctgcgatgttgttccttcaagggcaagcaagtataatgcctttacatcctcagcgatgtcttcacgctgcataaaatcatcaaggcttgtatggttgtggctcgtttgcagtgccgggtcaataaacgattcgattttctgcctcagctccgtttcgtcttcctgcaacagcaaatgaagggtgctagcgggtttttttggacataaaaaagaccctccccacataagtgaagagagcctttgaaatgccaataatttaacgtttcgagaactgaggtgcacgacgagcgcctttgagaccgtatttcttccgttctttcatacgggcgtcacgtgtcagaaggcctgcgcgttttaacactgcacgatattcaggatcagcctgcagcaatgcgcgggcaataccgtggcggattgcgccagcttggcctgtgaaaccgccgcctcttacgtttacgagaacatcgtagctgccgtttgtttctgttatattcaatggttgtttaatcacttcaactaaagcttcgaacggaatgtaatcttttacatcgcgcccgttaaccgtaatattgccgtttccaggaactaagcggacacgtgcaacagaacttttgcggcgtccggtcccggcgtattgtacttgtgccaaaataatgccctccttttaaaattatccgcgaagttcgtaaacttccggtttttgtgcttcatgcggatgctctgcgccagcatacacatgcaactttttaaacatctggcgtccaagggaacctttcggaagcatgcctttaatagcaagttccagcattttttctggatagttcgcacgcatttcgcctgctgtgcgctgtttcaaaccgcctgcaaactggctgtggcggtagtaaattttgtcttccagttttttgcctgtcaattctactttagaagcattcaggatgatcacatggtcgcccgtatccacgtgcggtgtgaaaaccggtttatgtttgccgcgtaaaatggatgccacttcagaagcgaggcgcccaagggtcttgccttcagcatccactacgtaccatttacgttcaacttcgtttgcttttgccatataagtcgtacgcatgagttaccctcctaaaaaatattcacaaaaacacagtcatgatctatttgcattatcacaataagtttccggggcttatcgtggagttaaaaaaacaataccataggttataatatcgttttggggcaagaatgtcaagcaaatgttacgcctggtccggttgtttttgtcttctttttatcatgcgggtccatgccccgtcaataagttactttccataaatacaatccttccggcggcgcggttttgcccgcatagatccggttgcgtttttcaaggatttcgcgcatttcaccgggctcgcgcttgccgctgccgatttcaagcaaagtgccggttaagatccgcaccatattgtataaaaagccgtttcctttaaaacagatcaccaattcatcgtcctgccgcaaaaaccggatctctttcaacgtgcggaccctgtcttccgcctccgtttttgccgagcaaaaactcgtaaaatcatgggtgccaagcacggcgtttgccgccgcttccattgccccggtatcaagcggaaaccagacccttaacgcgtaacggtgcttaaacgggctgcggacatgggaaaaatagatccggtagcggtattccttctcttttaccgagtagcgcgcgtgaaaaccggggcccacatacgccgctgccgaaactgaaatatcgccgggaagcaggctgtttaaagcggccggccagcttgtttccggaatagaaagatccgtatcgaaatggaccacctgccccatcgcgtgcacgccggcatccgtccttccggaagccgccgttttcacggggcggcctttatgaagagcggccagcgccttttcgatttcctgctggaccgtccgctgccccggctggacctggtaccccgcgaaccgggaaccgtcgtaactgaccgtacattttacgcgcttcataaaatccccccgtcacggaacagcacgagcaggatgataacggcggccagggcgcaaatggacagcgtatcagccgtgcgccagatgagcaagcggtattttgtccgcccctccccgccctggtagccgcgggcttccattgccgttgccagctcttccgcacgtttgaacgaactgacaaacagcggaattaataaaggaataatggctttcacccggtcttttatactcccgccggaaaaatcgacaccccgggccatctgcgccttcatgattttttccgtttcgtccattaatgtcggaatgaaccgcagtgaaatggacatcattaacgccagttcatggaccggaaattttactttccggagcggcgcaagtagcatttcaatcccgtctgtcagcgagattggcgttgtcgtcagcgtcaaaagcgatgttaaaaagatcaacagcataaacctgagcgaaataaacacgccctgccggatcccttcactataaatatgaataaatgcataacggaaaacaaggctgccctcacgattgaaaaacagctgcagaaaaaaggtaaaaatgaccagccataaaatcggcattaaccctttaataaaaaaacggacaggaacttttgaaaccagcataacaagcaaggtaaagattacgagaatcccgtaggtggccgcattattggccaaaaatacaatacaaataaagacgaatacaaaaatcaatttcgaacgcggatccatccggtgaatgacggaatcgcccggaatataacgcccgaaaatcattttttccatcatgcgcgcccaccccgtttcaaaaccgattgcaatgcttccgcaagttcttctactgtcaggcatgtctttttgaacttcataccggtttttttctcgagcatggtctggaagcggacaatctccggcacgcttaatccccatttttcaagcaacccgggatcggaaaagatgtcacggggtgcaccttttttcatcaatttcccctggtgcaaaatgacgagctcatcggcatacagggcggcatcttccatgctgtgggtaacaagcacagtcgttaaatgcttcttccggtgcaattcgtaaaacatgcccatcatctcgtggcgcccgcgcggatcaaggccggcagtcggctcgtccagcacaagcacatccggttccatcgcaagcacaccggcgatggcaacccgccgcatttgcccgcctgacaggtcaaacggcgattttgcaagaatctcttctgaaagcccgacaagccggatgagttcccttgcccgctgtttcgcttcttcatccggaacgccgaaatttttcgggccgaaacagatgtctttttccaccgtttcttcaaacagctggtgttcaggaaactggaacacaatcccgactttttgccggatcgccttcaagtttttttccttttttccgccttcaatcacccggccgccgatcgttacttttccttttgtcggctggagcagggcattcaaatgctgcagcagcgtcgatttgcctgaaccggtatgcccgatcacggcgatatagcggccggacgggatggcgagggaaatgtcatagagcgcaagcctttcaaacggcgtattcggctgataccggtattctacttgttcaaatgcaatgtccatagtgcatccaccaattcttcatctgttaaataaatttccggtaagtccaggccccttgctttaagcgcttttgccattttgaccgggaacggaatatcgaggccaagcgcggtcaatgtctcatccatttgaaaaatgtcacgcggtgtgccttcctggtagacctccccgcggttcatcacgatcatccgttccgcctgggcggcttcttcaagatcatgggtaatcgagatgacggtcagccccgcttcttgtttcaactggcggatcgtctccagcacttctttgcggccgaccggatcgagcatggatgtagcttcatccaaaatgatcacttccggcttaagcgcgatgatcccggcaatcgccacccgttgtttttgcccgcctgatagatggtgcggttcgcggtccagaaagtccgacatccgaacccgctttaaagcatcatggacgcgtttcaccatttcctcacgcggcacaccgtggttttccagcccaaatgcgacatcatcctgaacggttgtgccgacaaactggttatcgggattttgaaacaccatgccgacgcgccttctaatctcccagacattttcatccgacaacttgaggccggaaaccgttatcgcgccttttccgggaaactgcaagccgttcaggagcctcgccagcgtagactttccggatccgttatgcccgacaatggccagccactcgcctttataaacttgaaaagaaatatttgttagtgcatatgtttcctgttccgggtaacggaaggaaacctggtcgatgtcaatgatcacgttcgcgctgtctgccaatgccggattcctcctctgtaacctgctttctttgcacggttcaaacatgccaagcaatccttcttcatcctcttcagcatcattttcatcctgatggcggcgccttaaagttgcagcaggggcagccttcatgcgcctgcccctgcgccggcaacagcccgtttaaaaacggtttatctcacgaacgacgatgccaatgtttcgcccgtttgcttgtatttatattctaccgtattgtcgtgcagtttggcgggtaaaatatccccataataaaaaagcctgcacccctcttcagtgtagacgttaacaatccggcgcacagaaataaaaaggggtgcaagagctagacgggccacaaaatgcgcccatcgtaacactcacagtttgttgcatcacgcataaaagaaaaggtttcataaacacaggctgccctctagctgcaagcctgcgatgacgaaccgaaaaaagatagaaaaagggcaaagaagcagttaatattctttcaactgtccagcccttgagaaaatcattcgtttacttgctcttggtcttgctcttgctcttgctcttgctctttcttttcaacgaattcaataatcgcaaccggcgcaccatccccgcggcgcgggcctactttcaagatgcgggtgtaaccgccctggcgatccgcgtaacgttctgcaatgaccgagaataatttttgaacagcatcctgttttgtttctgcgtcagctgtttcatggcgtacatatgcagcagcctggcggcgggcatgaagatcaccgcgctttccaagcgtaactaatttttcaacaaccgagcgtaattcttttgcgcgtgcttcagttgtttcgatgcgttcattaatgataaggtctgttgccaaatcgcgcagtaatgctttacgttgggcgcttgtgcgtcctaactttctgtaaggcatgaagttccctcccttatgttggattaatcgctttgccttctaaccggctcagtcgtctttgcgcaaacccaagcccaaatcttcgagctttgctttgacttcttcaagggacttgcggccaagattccggactttcatcatatcttcttccgttttgttggccagttcctgaacggtattgatgccggcacgtttcaggcagttataagaacggactgaaagatcaagttcctcaattgtcatttcaagcactttttctttctggtcttcttctttttccaccataatttctgcattttgtgcttcatccgtcagtccgacgaagatgttcaaatgctcggttaaaattttggcgcctaaagcaattgcttctttcgggccgatgctgccgtcagtcgtgacatccagtgagagcttatcataattgctgacttgccctacccgggtattttcgacctggtagctcacgcgttgaaccggggtataaatagaatctattggaatgacaccaattggatggtcttcccgcttattttgatcagcaggaacatagccgcggccttggttggcagtcatgcgcatacgcaaatgcccgttttcggcaaccgtcgcaatatagagatccggatttaaaatctccacatcgctgtcatgcgtaatatcggctgctgtcacagcgccttctccctgtacatcaatctcaagcgttttttcctcatcggagtagattttcaaagccagctttttgaggttcaaaataatgctggtcacatcttcaacaacgccttcgactgtcgagaattcgtgcatcacgccatcgatttggatggatgtgacagcggcacccgggagtgaagataataggatacgacgtaaggagttacccaaagtagtaccatatccacgctcaagcggttctacgacgaacttgccataagtagcgtcatcgctgacctcaaccgtttcaatttttggcttttcaatttcaatcattcaaattaaccctccttcaaaacgtcgaaaccccgtatagcaccccagaaagagccctattcgaaattccccatgcaaaattccctattatgcataacaactggatcattcaaatcatttttttgcagattatgcatcatatcccattatagacaaggatacaaaatctatacaaaaaaaatcagacacgacgacgttttggcgggcggcaaccattatgcggcacaggtgttacgtctttaatggctgtaacttcaagcccggcagcctgcagggcacggatagcggcttcacggcctgcgccaggtccttttacatttacttccaaagacttcatcccatgttccatcgatgctttcgcggctgtttcagcagccatttgtgcagcaaacggcgttgatttacgagaacctttgaagccgagcgcaccggcactggaccatgcaacagcattcccatgcacatccgtgatcgtaacgattgtattgttaaaagtggaacgaatatgagcgacacctgattcaatattctttcttacgcggcgtttgcgcgtatttgttctgcgtgccatatgaacaacctcctttgcttattatttcttcttaccggcaaccgttttacgcgggcctttgcgtgtacgggcattgtttttcgtgttttgcccgcgaacaggaagaccgcggcggtggcggagacctctgtaggatccgatttccatcaggcgtttaatgttcaaggaaacttcgcggcgaagatccccttctactttcagcctgtccacgatatcacggattttgtttacttcatcctctgttaagtcgcggacgcgtgtatcttcagaaattccggcctcagcaagaattttttgtgcagttgatttaccgattccgtaaatgtatgttaaagaaataacaacacgtttatcacgtggaatgtcaacaccggcaatacgagccatacaggtgcacctccttcagatttatccttgtttttgtttgtgtttcggattttcacagattaccattactttgccttttctgcggataaccttgcatttttcgcagatcggcttcacagatggtctaactttcatggtttaccctccttaatatacggagtacaggcccggtaccctttatccagacagattccccgggcagactttccgtttcaccgaaaaagccgtgtatctacattatttaaaccggtacgtaattctaccgcgggtcaaatcatatggggacagttcaactgttactttatcgcccggtaaaatgcggataaagttcatccggattttacccgacacatgcgcaagaacagtgtgaccattttctaattctaccttaaacatggcattcggcaaagtttcgcttacaatgccctcaacttcaataacgtcatctttcgccatcgaactattctccctcctcctaacatttaggacctggcaatgatacttttccaaaaccttaaaacgattaggctcgccaaaactcccgcttcaggaagcggccggcctgctgcatattcacgtaaaccggctgatccggggggccggcaggagctgataaacgttcccaaggttacatggttctttcatgtcagtcttgaccaatcccatgtccggcatacatgtgaacgaacgaaagccatttgcacagaattgaattgcatgagagacgttcgaatgacgcttactggcaatcctgacaacggaagccgccttcctcatctattgattacaagttaactgatgaagcaaatcgccaataaaacagagccgtcatttcacccgtgaaatatccagcggtgaaaatgccacgaaaaccattataacctttttaagcggaaattgcatcaaacttgaaaagttttttaccgtccggacacagccgaaaagccgtccggataaaacttccaaaggtggtttccatccaacgtgattgcggctctcatgaattcaccaagtcgttcacgtttaacccagttggcccagcaattgatcgatatccgcaaaaacttgatgaatatcctgctggccgtttacattccgcaaatagcctttttcctcataaaagtccagcagcggccgggtttgcttcatattgacatcgagccggttcccgacagtttctgcgttgtcatccggccgttgatacagcgggccgccgcatttgtcgcaaacgccctccgtttttggcggattaaacacgagatggtaagtcgcaccgcaattttcacaaattctccgaccggtcagccgctctgtcagaatctcccggtccacctctatgttgataacataatcaagccgtttgccaaggctgcttaaaatattttccaaagcttctgcctgggcaaccgtccgcgggaaaccgtcaagcaggaagccatttttgcagtcatccttgcttaaccgttcgcgcacgatcccgatcgttacttcatcagggaccagttcgcctttgtccataaaggatttggctttaagccccagctccgtttcttcctttatcgccgcccggaacatgtctccggtggaaatgtgaggaatggcatacttatcaatgattttttcggcttgagtccctttaccggctccgggaaggcccattaacactaaattcatcgtacagcccccttattcctgacatggtttcaagtgcaaaaccatttttatttgataaagcctctgtaatggcgtttaacaagctgtgcttccagttgcagcatcgtttcaagcgcaaccccgatcacaacgagcaggcttgtgccgccgattctggcggaagtcgggagcccgatgacattcgtgaaaatgacaggcagaatggcaatcacagcaagaaagattgaaccgacgaatgtcagccggtataaaaccgaagtgacatattgctgtgtgtttttgcccgggcggatccccggaatatagccgccttgtttctttaaattgtcggcaagctgctccggattgacttgtacgaatgcataaaagtacgaaaaagcgataatcaacgccacataaatcaaagctccgaccggttttgtatagtcaaaaatatactggatggtgcttgccacactgctggaaccgaaaaacgaagcaatcgtctgcggcgcaataatgaacgaaatcgcaaagataaccggaatgaccccggcagcattgacctttaaaggcaaatgcgttgactgcctgccggttgttgccctgccggaaatgtgctgggcatactggaccggtatctttctcgatgcctgctggaaatagatgactccgaccacaatggccagaatgatcaatgcaagaaaagccagcaaaacaatcttcaaaaacagctgggaaccggcattttcaatttgctgtgcgtaaatctggttgatggctgtcggaatcccggcaataatgccggccataatcaaaatggaaatcccgtttcctacgcctttggccgtaatttgttcgccgagccacatcaaaaatgtggtaccggctgtcagcgtcagtgcgatgatcaaatacgtccagaaaccggacttcgtaatcagtgccccctgcgccaaattattaaagccatatgacatgccgaagccttcaattaaagccaggataaccgtaaaatagcgtgtaaactcactcagcttacgacgccccacttcaccctgttttgcccactcggcaaacttcggcacaacatccatttgcaagagctgcacaataatggaagatgtgatatatggcataatgcccattgcaaaaatggaaaagttcttcagcgcaccgcccccaaaagtgtttagaaagccgactaaaccgttttgggtggaggcttccaatacggaagcatccacataaggaacaggaataaaggctcctatgcggaatacaaccagcatgaggagggtgaaaataattttatttcttatctcacccacacgcatcaaattggcgattgtcttgaacattaaatcacctcagctgtaccgccagcagcttctatggcttctttggcagcagaggagaatttatgtgcttttacggtcaattttttctcgagtttgccgtttgcaagcacttttacgcccgatttttccttgctgatcacacctgtttccaataaaagggcaggcgttacttccgtgccgtcttcaaaacggtttaaaacgtccaggttcacaatggcatactctttacggttgatgttcgtaaaaccgcgtttcggcaaacggcggaacaacggggtttggccgccttcaaaaccgaggcgtacaccgccgccggaacgggcgttttggcctttgtgccctttgccggctgtttttccgttgccggaaccaataccgcggccgacacggttgcgttttttacgggatccttctgcaggttttaattcatgaagtttcatggttgcacctccttatcttaaaatcaaaaattattgttccgatacagaaacaagatgggacactttattgatcatgccgcgaattgcagcattgtcttctttctcaacagtctggttgactttgcgcaggccgagcgcttttaccgtatcgcgctgatcctgcgggcggccgatgacactgcgggtgagggtgattttcaattttgccatgagcgttccctccttaacctaataattcttcgacagatttattgcgcagtttcgcaacttcatccgcacgcttcaattgtttaatgccgtccattgtggcacggatcatgttaatcggtgtgtttgaaccaagcgatttggacgtaatatccgcaatacccgcaagctcaaggatcgcacggacagggccgccggcgataacaccggtaccaggggaacccggtttcagcaggattttgcctgcaccgaagtggccaacaacttcgtgcggaatcgttgtgcccgcaatcggtacctctacaagatttttcttcgcatcttcaacagctttgcggatcgcatccggcacttcctgcgcttttccggttccaaatccgacatgtccgttccggtcgccaacaacgacaagtgcggaaaagcggaaacggcgccctccttttaccactttggcaacgcggttaatcgtaacaacacgttcctctaactcaagtttgtttgggtcaatacgtagcatgtaaaatttcccctcctttttgattaaaattgtaatccgttctcacgggctgcatcggcaagcgctttgatacggccatgatagagatatccgccgcggtcaaaaacaacttctttgatacctttttccactgcgcgctttgcaatcaattcgcccaccttttgtgcagcttccacatttccggttgactcaaggctcaactctttatcgagcgtggaagcgctggccagtgtgacgccctttacatcatcaatcaattgggcataaatgtttttgttggaacgatagatattcaggcgcggacgttcagccgttccgcttaattttgcgcggacgcgtgcatgcctttttttgcgtacttgatttttatccggcttcgtgatcatcgaattcactcctttctcatcctaggcggcattatttaccggttttaccttcttttctgcgtacatattcgccttcgtaacgaatccctttgcctttataaggttcaggcgggcggacgtcgcggatgttggcggcaaatgcgccgacgcgttctttgcttacgccttttacgacaatttttgtattggaaggcacttcgacttccaggccttcttccggttcaaattcaacaggatgggagtagccgacgttcaatacgagttttttgccttgtttttgggcgcggtatccaaccccaaccagttccaaagatttttcaaagcctttcgacaccccttccaccatgtttgcgagcagtgcgcgggtcgttccgtgcaaagcgcggtggattttgctgtctgaagggcgtgttacgtgaatgatattgtcttctacggcaatgttaatatcagggttgaagctgcgggtcagctcacctttaggccctttaaccgtaactgtatctccgttaatggttaccgtaacgccggatggaatttcaaccggtttttttcctatacgtgacataatttacacctccgttcaacgtcaaatgattaccaaacgtatgctaaaatttctccgccgacattgtttttccgtgcttctttgtcggttaaaacgccctgagaagtagaaacaattgcgatgccaagcccgttcagcactttcggcacttcacctgcttttgcgtatacgcgcaggcccggtttgctgatacgcttgatccctgtaatgacgcgttcgttgtttgcgccgtatttcaggaagatccggataatcccttgtttgttatcctcgatatattcaacatcacgcacgaaaccttcacgtttcaaaatctcggcgatctctctcttaatcttggaagccgggacttccaatttttcatgacgcactgtatttgcattacggatacgcgtaagcaaatctgcaatcggatcagtcatgaccatttcttttacctccttcccaaattcgggttttaccagctggcttttttcacgccaggaatttgacctttatatgcaagttcgcggaaacaaatacggcaaagtttaaatttgcgaatgacggaatgcggccggccgcatcgttcgcaccgggtataagcctgaactttatacttcggttcacgtttttgtttcgcaatcattgattttttagccacgttttcgcctccctttttagcgcccgctttatttttggaatggcattccgagcaggcctaacagttcacgtgattcttcgtccgtgttcgcagtggtgacaatgacgatgtccatcccacgcactttgctgactttatcgtaatcaatttcagggaagatcagttgctctttaatgccgagtgtatagtttccgcggccgtcaaatgattttttcgatacgccgtggaagtcgcgcacacgcggaagcgaaactgaaatcagtttatcgaggaattcgtacatgcgctcgccgcggagggttactttcgcgccaatcggcatcccttcacgaaggcggaaacctgcgatcgattttttcgctcttgtcacaaccggtttttggccggaaatcaacgttaattcttctactgcattgtcgagcatttttgcgttttggacagcatcgccaacacccatgttgatcacgatcttttcaactttaggcacttgcataacggatgtatagtgaaacttgcttgttaaagcaggaataacttctttttcatatttttcttttaggcggttcatgtcgtgtacctcccttcatgttcaactatttatctaaaacttcaccggatttttttgctacacgcacttttttgccgtcccttatttcatatccgacacgtgtcggctcatttgttttcggatcaatcggcatcacattggacacgtgaatgggcgcttccatatcgaaaataccgccctgtggatttgcctgggaaggtttcgcgtgttttttgacaatgttcacgccttccacaatcacacggtcttttttcggatatgccgcaaggatcgtaccggttttgcctttatctttgccggagatcaccattaccttgtcaccttttttgacatgcattacagtcgcacctccttgattgtcacaaactgtatcgattaaagcacttccggagccagtgatacgattttcatgaaattgttgttgcgcagttcacgtgcaacaggcccgaaaatacgcgtgccgcgagggctcttgtcgtcacggataatgacgcatgcattttcatcgaaacgaatataagaaccgtcgctgcggcgcactccgctctttgtacggaccacaacagctttcactacatcaccttttttaacaacgcctccaggtgttgcttgttttaccgtagcaacgatgacatctccgatattcgcggttttccggccggatccgcccaatactttaatcgtcaaaacttcacgtgcacctgagttgtcagctacttttaaacgggtttcttgttggatcatcctcgtttacctcccttcggaatcaaccgtatccgaactgatacaaattagataatgactgctttttcaacgatttccaccaggcggaaacgttttgtagcagataacgggcgtgtttccatgattcttacgatatcgccgactttggcttcgttgttttcatcatgtgccttgaattttttcgagtattttacgcgtttgccgtacagagcatgttttttgtaagtttctacaagaacagtaacagttttatccattttgtctgatacgacacggccggtgtatactttgcgttggttgcgttcactcatgtatcgcgaacctcctcccattatcggttgttaattccaatttctctttcacgaatgacggttttcatgcgggcaatcgatttacgaacttcacgaatgcgggcagtgttctctaattgtccggtcgcaagctggaagcgaaggttgaacagctcttccttcagcgactttactttttgttcaatttcggcagtggttaagtcacgaatttctttagctttcattagattcaccaccaatttcttcacgttttacgaacttgcatttaatcggcagcttgtgggacgcaaggcgcaaagcttcgcgtgcgacttcttcaggaacaccggcaatttcaaacaaaatcttgcccggtttcacaacagccacccagccttcaggcgcacctttaccggaacccatccggacttcaagcggttttgctgtatatggtttatgagggaaaatttttatccatactttaccgccacgcttcatataacgtgtcatcgcaatacgggcagcttcaatttggcggtttgtaatccaggaagcttccaaagcctgcaaaccatattcgccaaatgcaacttcagtgccgccttttgcacggccgcgcatttttccgcggtgttcacggcggtattttacacgtttaggcatcaacatgatcagtttcccccttcctcggtttttttcttggcaggaaggatttccccgcggtaaatccaaacttttacgcccagttttccgtaagtcgtatctgcttcggcatgggcatagtcaatatccgcacgaagcgtatgaagcggaactgtaccttcgctgtaatgttctgcacgggcaatatccgcaccacccaggcgtcctgaaacctgcgtccggattccttttgcaccggcacgcatcgcacgttggatcgcctgtttttgcgcacggcggaaagaaacacggttctccagctggcgggcaatgttttccgcaacaagttttgcatcaatatctgcctttttaacttcgacaatgttaatgtggactctttttcctgttaaagcattcagtgctttacgcaatgcttctacttccgaaccgcctttaccaatcaccatgcccggttttgccgtgcggattgtaatgttgacacggtttgcagcacgttcaatttccacgccggaaacagaagcatccgcgaggcgctttgcgatatattcacgaattttaatgtcttcgtgcaatagatcggcataatctttttctgcgtaccatttcgattcccagtcacgaatcactccgattcgcaaaccgataggatttactttttgacccaccaattatccctccttttgatctgatactacgatcgtaatatggctcgtgcgtttgttgatctggcttgcgcgccccattgcacgcggccggaaacgtttcagtgtaggcccttcatcgacataagccttttccacaacaaggtcgtttgcgtccatatcgtagttgtgctctgcgttcgcaatcgcagagttgagtactttttcaataaccggcgaagcagcctttggcgtaaatttcaaaatcgaaagcgcttctcctacttgctttcctcgaattaaatcaattaccaggcgtgccttacgaggagcaatacggactgttttcgcgacagcttttgcttgcattggaatacctcctcccgttagcgtcttgtcttcttatcgtcaccggcgtgacctttgaatgtacgtgtcggagcaaactcaccgagcttatggccgaccatatcttccgtgatatataccggaacatgtttacggccgtcatacacagcgattgtgtggccgacaaatgcagggaaaatcgtcgaacggcgtgaccacgttttgatcacttgcttcttgttggattcgttcaatttttccactttcaccattaagtgatcgtcaacgaaaggcccttttttcagactgcgacccatgaatagtcctccttcctgattagagctacggttcaagctgcgaaccgtagttcaacagcattattttttacggcgccgtacaataaatttatctgaagtatttttcttcttgcgcgttttgtaaccaagtgtcggcttgccccatggtgacattggcgatttacggccgatcggagcgcggccttcaccaccgccgtgcgggtgatcattcgggttcataacagatccgcggacagtcgggcgtacacccatccagcgtttgcggcctgctttaccgatgttgaccagttcgtgctgttcgttgccaacctggccgaccgttgcgcggcaagttgcaagaatcatgcgcacttcgccggaattcaggcggacaagcacatatttgccttctttaccaagcacttgtgctgaagtaccagcagaacggatcaattggccgcctttgcctggtttcaattcaatgttatggataaccgtaccaacaggaatttcagaaagcggaagtgcatttccgactttaatgtctgcatccggcccggacatcacttccatgccgacagttaaattttttggtgcaaggatgtaccgtttttcaccatctgcatagtgaatcaaagcaatattagatgagcggttcgggtcatactcgattgtggcaacgcgccctggtataccatctttatcgcgtttgaagtcgataatccggtattggcgcttatggccgccgccctgatgacgaacagttaatttcccctggttgttgcggcctgcttttttcgaaagcggagcaagcagtgttttttcaggcttatccgtcgtgatctccgcaaaatccaaagccgtcatgccgcgacgcccgttagaggttggtttgtattttttgatcgccatttttttccctcctcttcaagtttgatggatcgtatttaaacctcaaagatttcaatttccttgctgtcagctgttaacgtaacaactgctttgcggcgcttgtttgtatagccggtataacggcccatgcgtttgaacttgcctttatagttcgcaacgttcactttcgcaactttgacgccgaaaatctcttccacagcatctttgatttctgttttattcgctttaacatcaacttcaaatgtatatttcttatctgccgtcaattccattgaacgttcagtaatcacggggcgcttcagaacatcacgtgcatccattaaccaagcacctcctctactttttcaacagcggattttgtcataatcaattgatcatggtttacaacatccaaaacatttacgcctgttgcttcaacaaccgtaacacccggaatgttgcgtgcggacagtaccacattttcgttcaatccgtctgtgacaacaagtgcttttttatccactgacaaatttttcaggacggcaataaaatcttttgtttttggcgcatcaaaacttaatgcgtccagaaccaaaatattgttttcctttacttttgacgatagagcggatttaatcgcaagacggcgtacttttttcggcagtttgtagctgtagctgcgtggaacaggcccgaaaaccgtaccgcctccgcgccattgcggggaacggatcgatccttggcgtgcgcggcctgtgcctttttgtcgccatggtttgcgtccgccgccgcgtacttcagaacggccttttactttgtgggtaccttggcggagcgaagccctctgcatgatgatcgcttcaaataaaacatgttcattcggttcgatgccgaatacagcgtcgtttaattccacttcaccgacttgcgaaccgttttggttgtatagagctacttttggcattcctgtttcctcctttctttgcaattattttgcttttacagctgctttaactgtaaccaaagcttttctcggaccaggaacgttacctttaatcaaaagcagattgcgttctgcatccactttgacgatttgcagattttgaacggtaacccgttctcctcccatgcgtccagggagtgctttttgtttaaagacgcggtttggcgcaatcgggcccattgaacccggacggcggtggtaacgcgaaccgtgagccatagggccgcgggattgtccgtggcgtttaatgacgccttggaatcctttcccttttgtaatgccggtaacatctacaatgtcaccttctgcaaaaatatctactttgacttcttgaccaacttcaaaatcacttgtgtttacgccgctgaattcgcggatgaagcgcttaggtgccgtattggcttttgaaacatgacccttttccggtttgtttgccaggcgttccggtttgtctgcaaatccgagctgaatcgcttcataaccgtccgtttcaactgttttcttttgcagcacaacgtttggtgttgcttcaattacagtgacaggaataagatcgccgttctcggcaaaaacttgggtcataccgatttttcttcctaagattcctttggtcatcagtcacacctcctgttaaatatgtcatgtttttttatcattaaagtttaatttcaatgtcaacgccggatggcagatccaaccgcatcagcgaatcaaccgtttgcggggtcggatttacgatatcaatcaaacgtttgtgtgtacgcatttcaaattgttcacgagaatctttgtacttgtggacagcacgcagaatggtgtaaacggatttctcagtcggaagcggaatcggaccggagacgtttgcacctgatcgttttgctgtttctacaattttttctgcagactgatccagaattctgtgatcgtatgcttttaaacgaatgcgaattttttgttttgccattattttccctcctttatcgcctatttgctaatagacattctccatggaaattttcctggcccacgcgccatggcaaagcggccgggtgtgccagcaacctcccacttcatcgcagtcaaagaccaacatcaaacattatacacaaaagccgagtgtaatgcaacataaactttgatatgctgctgatttcagtgacttttttattatactggccctgtggcgcaacatcaagttttggaaaacattgctgcaacccgggcgcgtaagcatggaaaaagcccggccgggatgacctggccgggctttttttaaatagccgattaagcttcgatggaagaaacagaaccggcgccaactgtacggccgccttcacggatcgagaattttgttccttcttcgatcgcgatcggggcaatcaattcaacgctcatttcaacgttatcaccaggcataaccatttcaacgccttctggcagagtaataatgccggttacgtccgttgtacggaagtagaattgcggacggtagttagagaagaaaggagtgtggcgtccaccttcttctttcgttaatacataaacttgtgctttaaatttggtatgcggtgtaatagaacccggtttcgccaaaacttggccgcgttggacttcttcacgtgcaataccgcggagaagcgcaccgatgttgtcgcctgcttcagcatagtcgagcagtttgcggaacatttcaacgccggtaaccgttgtttgtttcggttcgtcgttcaaaccgatgatttcaacaacatcgccgactttcaattgcccgcgttctacacggccggttgcaactgtaccacggcctgtgatggaaaatacgtcttcaactggcatcatgaacggtttatccgtgtcacgttgcggagtcgggatgtattcgtcaacagcatccatcaattcaaggatttttgcttcgtattcagggtcgccttcaagagctttcaaagcagagcctttgataaccggcacttcatcgccagggaagtcgtattcggaaagaaggtcacgaacttccatttcaacaagttcaagcaattcttcgtcgtccaccatgtcgcatttgttcaggaacacaacgatgtaaggcacgccaacttggcgggacaaaaggatgtgttcgcgcgtttgcggcattgggccgtcagcagcggatacaaccaggatcgcgccgtccatttgggcagcaccagtaatcatgtttttcacatagtcagcgtgtccagggcagtcaacgtgtgcgtagtggcgtttttccgtttcatattcaacgtgcgcagtgttgatggtaataccgcgttcgcgttcttccggagcaccgtcaatttggtcatatgctcttgcttctgctttcccttgttttgcaagaacagcagtaattgcagcagtcaaagtcgttttaccatggtcaacgtgaccgattgttccaatgttacagtgttctttagaacggtcaaatttttgtttagccatcaggaaatcctccttaatattttggattgagtaagtatatggatgctttaaagctgaaaggacagctttaaagcgctttgaaccaacctagtaaagttatacttcattgaaggcaataaatcaattattcgcctttattttttttgatgatctcttccgcaatggacttcggcacttcttcataatgatcaaatgtcatcgtgaagacaccgcgtccttgcgtgctggatcggagtgctgtagcataaccgaacatttcggacaacggaaccatggcacggacaacctgggcatttccgcgtgcttccataccttccacacggccgcggcgggctgtaacttgtcccatgatgtcgccgagatattcttccggaatgacaatttccactttcatgacaggttcaagcaggaccggatcgcatttggatgctgcattcttcaatgcaagggaggcagccactttaaatgccatttcactcgagtccacatcgtggtaagaaccgtcatacagttttgccttaatgtcaacgagcggatagccggcaagtacaccgcgctgcatggcatcttcaaggccggactggatcgccggaatgtattcgcgcggaacgacaccgccgacaatcgcattttcaaactcaaagccttttccttcttcgtttggtgaaaattcaatccaaacatccccgtattgcccgcggccgccggattggcgtacaaacttaccttggacttttgcggatttgcggaatgtttcacggtacgcaacttgcggcgcaccgatattggcttcaactttgaattcgcgtttcatgcggtcaacgataatgtcgaggtgaagctcacccataccttcgatgatcgtttgtcccgtttccggatccgtatgggcacggaaagtcgggtcttcttcctgcagtttttgcagcgccgtcgtcattttatcctggtcggctttcgatttcggttcaaccgacaactggataaccggttccggaaattccatcgattcaaggatgaccggattattatcgtcgcaaagcgtatcgcctgttgtcgtgtcttttaagccgacagcagcagcaatatcgccggcataaaccatgtcgatttctttccggtggtttgcgtgcatctgcaaaatacgcccgatgcgttcgcgtttgttctttgtcgagtttttgacataagaaccagcgcttaatgtgcctgaataaacacggaagaatgtcagtttaccaacgaacgggtctgtcatgactttgaaggccaaagccgagaatggctcatcatcgctggaatgcctgaatacttcttcccctgtatccggaagcgtccccttgatggaaggaacatccgtcggcgcaggcagatagtcaacaaccgcatccagcattaattggacacctttgtttttaaatgccgagccgcacagtaccgggaagaattcaacattacaggttgctttgcggatggcagctttcagttcttcttttgaaatctcttctccgccaagatatttttccataatatcttcatcaacttcagcaactgcttcaagcagtttttcatgatattcttccgcctgatcacggtactcatccgggatttcgcgcacttcaattttcgtgccgagatcatcgccgtagaaagttgcattcatttcaataaggtcaatgatccctacaaagttgtcttcagcaccgatcggcaattggaccggatgtgcatttgcctgcaggcggtcatgcagggtgctgacagaatacaagaaatcggccccgattttatccatcttattgacaaatacaatccgcggtacaccgtaagtcgttgcctggcgccaaacggtttcagtctggggctcaacgccggactgggcatcgaggacagcaaccgcaccgtcaaggacacgaagggagcgttcaacttcaacggtgaagtccacgtgtcccggggtgtcaatgatgttgatacggtggtctttccattgcgctgttgtagcagcggaagtaatcgtaatcccgcgctcctgttcctgctccatccagtccatttgagacgcaccttcatgcgtttcgccgattttatgaatacggccggtataataaaggatacgctcggttgttgtagttttaccggcatcgatatgcgccatgataccgatgttacgagtcttttctaaggagaactctcttggcatctcgtactttctccttccttaataggtgtaatgtaggagtatcggaatattaccagcgataatgcgcaaacgctctgtttgcttccgccattttatgcgtatcttcgcgttttttcacggcagcgcctgtattgttggccgcatccatgatttcgttcgccagccgttcttccattgttttttctccgcgaaggcgggcataattgaccagccagcgaagccctaaagttgtccggcgttccgggcgcacctcaaccggcacctgatagtttgcgccgccgacacggcgagctcttacttcaagtacaggcataatgtttttcaatgcctggtcaaaaacttccattggatctttgccagtgcgttcacggataatatcgaaggaagaatacaggatagtctgggctttccctctcttgccgtcgatcatcattttgttgattaaacgtgtgaccagtttcgaattgtaaatcggatccggtaatacgtcgcgttttgcgacaggtcctttacgtggcataaatgatcctcctttcaagtatggttatcgttcttattatttcttttctttcggttttttcgtcccgtatttcgaacggccttgtttccggttgtcaacaccggcagtgtcaagcgcaccgcgcacgatgtggtaacgtacaccaggcaggtcttttacacgtccgccacggattaaaacaacgctgtgttcctgcaggttatggccgatcccagggatataagccgttacttcaataccgtttgttaaacggacacgggcatatttacggagcgccgagttcggtttcttcggagtcatcgtccccacacgggtacatacaccgcgtttttggggtgaagaaagatcggtattgatttttttgaaactgttatagcctttattcagcgcaggtgacttggatttctcgatttttgatttacgaggtttgcgcaccaattggttaatagtaggcatctgtttttcctcccttcgaacaatttaagtccacacatccaggtggttcatttaatggcaaaaacaaatttttgcggattctcccgcaaaaagtgtttaataaataagtgcaacagctgcagctccgacttcaatgccgcatacttttccgagttgttttttcgactcggtatacgtaatcggcacattgaattgttcggcaacggaaatgactttgcccgtaatattcggatcagcatctctggcaacgagcagttcatccacatttccggactttatcgctttcgctgtttgttttgtccctacaacgattcttttcgcctgatttactttttcataagacatcgcaatatcctccaaagtatacaggtattcataggagcaccttgaatatattatcactttgaaaatctaaagtcaacagcccgtgtaaaaaaggccatgcttttttttgctaaaaaacagaaaaaggtgcagcaccggtttttgccggtgctgccgccgcattattcagccggcacttcttcttcctttttcaccagttcaggaaccgttttgcggtagcgggtcatgcccgtccctgcaggaaccagtttcccgataatgacgttttctttcaagccgagcagttcatcgcgtttccccttgatcgccgcatcggttaatacgcgggtcgtttcctggaaggaggctgccgataagaacgaatcggtttccaaggaagcttttgtaatcccgagcagaacagggcggcctgttgcagggcggttgccttccttgagcgccttttcattcgcttcaccgaactgatggatatcaagcaatgttcccggcaggacatccgtgtcgccggcatcgagcacccttacttttctcagcatttggcggaccatcacttcaatgtgtttgtcgccaatttccactccttgcatccggtaaactttctgtacttcacgaagcaagtattcctgtacggttgtgacatccgtgacacgcaacaggtctttcgggtcaatggaaccttccgtcagctcctgcccgcgcacgacgtggtcatctaccgccactttcaagcgggaagtataaggggccgtataggtgcgcgtttcgacagcgccctgaacgacaatttcatattggcggtcgcgcccttcgctgatggaagtaacaacgccttccacttcggaaatgacagcctggcctttcgggttccgggcttcaaacaattcctgaatacgcggaagaccttgtgtgatgtcatccccggcaacaccgcctgtatggaatgtacgcatcgtcagctgtgtgccaggttcgccgattgattgggcggcaataatcccgactgcttcgccgacttccacttcctggccggtggcaaggttgcggccgtagcattttttacatacgccatggcgggtattgcaagtgaaggccgaacggatccagactttttcatagccggcatcgacaatttccttcgcgatatcttccgtgataaagccgttttcctcaatgatcactttgcctgtttcaggatgtttgatcgtttttcttgaataacggccggttaaccgttcttcaagcgattcaatgatttcattgccttctttcaacgcactgatcaaaagcccgcggtctgtgccgcagtcgtcttcacgaatgatgacatcctgcgccacatcaacaagccggcgtgtcagataacccgagtctgccgtcttaagggcagtatcggcaaggcctttacgggcaccgtgcgtcgaaataaagtactcttgcacggttaagccttcacggaagctggacttaatcggcaattcaataatccggccggccgggttggccatcaaaccgcgcatgccggcaagctgtgtaaagttcgacgcgttaccccgggcccccgagtcactcatcataaaaatcgggttccgtttatcgagcgattccatcagtttgccctggatcgtgtctttagccccgctccagatcgaaataacgcggtcatagcgttcgtcttcggtaattaaaccgcggcggaactgtttcatgaccgtatcgacttttttctgggcatccgaaagaattttttccttctcgcctaaaacgacgatatccgcaacaccaacggtaatcccggcttttgtcgaataatggaagccaagatcttttaagcggtcgagcatcttggatgtttccgtaatcttgaaccgtttgaacacttcggcaatgatgctgccaaggaagccttttacaaacgggcggattaacggctgttctttaatatgcgcttttacgtcaatcgaaggatcaacaaagtatttatccggcgttttttcttcaagatttgttttcgtcggttcattaatatatgggaagctctccggcaaaatttcattgaagatcactttcccgactgtggtaatcagcagcttcttgttttgctcttccgtgaacgtcgggttgttcagcgacccggcataaatggcaattctcgtatggaaatgcacgtagccgttataataagccgtgtacacttcatttacatctttgaagacagatccttcaccgactgcatcttcacgttcaagcgttaagtagtagttgccaagtaccatgtcctgggacggggtaacgaccggtttcccgtctttcggattcaaaatattttgtgcggcaagcatcagcatgcgcgcttccgcctgtgcctcagcggataacggaacgtggaccgccatttggtcgccgtcaaagtccgcgttgtatgccgtacatacgagcggatgaagacggatcgcacggccttccacaagcgtcggttcaaacgcctggatcccgagcctgtgcaaagtaggcgcacggttcaacaggacagggtgttctttaatgacttcttcaaggacatcccaaatttcaggctgcaaacgttcaattttccgttttgcgcttttaatattatgggcgaggcccttttcaaccagttctttcatcacgaacggcttgaacagttcaatcgccatttcgcgcggcaggccgcattggtacattttcaggttcgggccgacaacaataacggaacggccggaatagtcaacccgcttcccgagcaggttttggcggaaacggccctgtttccccttcagcatatgggaaagcgattttaacgggcggttccccgggccggttaccggacgtccgcggcggccgttgtcaatcagagcgtcaacggcttcctgcagcatccgtttttcattttggacaatgatgcttggtgcgccaagatcaagcaggcgtttcaggcggttgttccggttgatcacacggcggtacaaatcatttaagtcggatgttgcaaagcggccgccttccagttgtaccattggccgcagttcgggcggaatgaccgggagaacatccagcaccatccattccggtttattgccggaattacggaaagcttccagtacttcaaggcgtttgatggcgcgtgtacggcgctgcccctgggcaactttcagctcttctttcagcatttcgcattccttgttgacatctacatcttgcagcagctttttaatggcttccgcgcccatgcctgcctggaatttgttgccgtatttttcacggtaggcacggtattctttttcggaaagaagctgtttcttttccaaagaagtgtcgcctgcttccgttacgacgtaagatgcgaagtaaatgacttcttccagggcgcgcggggacatgtcaagcacaaggcccatgcggcttggaatccctttgaagtaccaaatatgcgaaacaggggcggcaagttcaatatgccccattctttcccggcgcacttttgatcttgttacttccacgccgcagcggtcacaaaccacgcctttgtaacgaacgcgtttatatttcccacaatggcattcccaatctttcgtcggcccgaaaatccgttcgcaaaaaagcccgtctttttcaggttttaacgtccggtagttgattgtttccggtttttttacttcaccgtatgaccaggatcggattttatccggtgaagcaagaccgattttcatgtactcaaaattatttacatccagcaaggggccagcctccctttcgtctttaggttcgtaccttaaaacacacgcagaagaaacagaaacagaagccggattgtacgaatgcatacaatccgggcaaaagcctctgtttgttccaagcaacataaacgattagtctttggatgccccgattccttccggttcttcttttgtctcgggcgcaatattcagcgtatcggcctgattcaggtcatcgtcgtcttcgagatcgcgcatttcaatttcctcgtcgtcgccggaaagaatcttcacgtccagtcccaagctttgaagttctttgatcagcactttgaacgattccgggacacccggttcagggacattttcccctttgacgatcgcttcataagttttcacacggccgacaacatcgtccgatttaacagtcaggatttcctggagcgtataggctgcgccgtaggcttcaagcgcccatacttccatttcgccaaacctttggccgccaaactgtgctttaccgccaagcggctgctgggtgacaagcgagtaagggcctgttgagcgggcatgcagtttatcatcaaccatgtgggcgagcttgatcatatacataatcccgactgatacacggttgtcgaaaggttcaccggtgcggccgtcataaaggaccgtttttgcatcgcgcgccatgccggcttcttcaatcgtttcccatacatcttcttcacgtgcgccgtcaaatacaggcgtcgcaacgtggaggccgagttttttggctgccatgccgaggtggagttcaagcacctgcccgatattcatccgtgaaggcacgccgagcggattcaacatgatctggacaggtgtcccatccgggaggaaaggcatatcttcttccggaagaatccgggagataacccctttgttcccgtggcgcccggccattttgtcgccctggtggattttccttttctgtacaatatagacacggacaagctggttcacgccaggcggaagttcatccccggcttcacgtgtaaacactttgacatcgagcacgataccgccgccgccgtgcggaacgcggagtgatgtatccctgacttcgcgcgctttttcaccgaaaatcgcatggagcagacgttcttccgccgttaattccgtaacgcctttcggggtgacctttccgacaagcaaatcgccgtcttttacttcagcaccaatccggataatcccgcgttcgtcaaggtttttcaaagcatcttcccctacgttcgggatatcacgggtcatttcttccggcccgagttttgtatcgcgtgcttcagattcgtattcttcaatatggatagaagtatacacatcttcttttacaagtttttcactcataataatggcatcttcatagttgtaaccttcccatgtcataaaggcaacgagcacgttctggccaagggcaagttcaccttggtccattgactggccgtccgctaaaatttcgccttttaccacacggtcgccttttttcacaatcgggcgctggttgatgcacatgccattgttggaacgtttgaatttttgcaggcggtatttgtcaaggtcgccctttacttcctgtccgtcgacatcgatcacacggcgcacccagatttcccgggcttccacatgttcaacaatgccgtcatatttgcagatgagtgccgcgccggaatccttcgcattgacatattccatcccggttccgacaatcggcgcttgcggcttcataagcggaaccgcctggcgctgcatgtttgcacccatcagcgcacggttcgagtcgtcgttttcaaggaacggaatacatgccgttgcagccgatacaacctgcttcggcgaaacgtccatataatcaacgcggtctgtttttacaacaatgttttcaccgcggaaacgcgcatatacttcatcgtcaacgaaaaagccgttttcatccagctgtgcgttcgcctgtgcgacgacgtaattgtcttcttcatcagccgttaaataatcaatatgctccgtaacacgccctgtatccggatcaaccctgcggtaaggcgtttcgataaaaccaaaacggtttacttttgcataagttgataaagagttgatcaacccgatgttcgggccttcaggcgtttcaatcgggcacatgcggccgtagtgggaatagtgcacgtcacgcacttccatcccggcgcgctcacgggtcaaaccgcccgggccgagcgccgacaaccggcgtttatgggtcagttccgcaagcgggtttgtctggtccataaactgggacagctgtgaactgccgaaaaactccttaatggccgcaatgaccggacgaatattgatcagctgctgcggcgtgatagtattaatgtcctggatcgacattctttctcggacaacgcgttccatccgggaaaggccgatgcggaactggttttgcagcaattcgccgacagaccgtaaacggcggttgccgaggtggtcgatatcatctgtattgccgacgccatgcagcaaattaaagaagtagctgatggaagccacaatatccgcaggtgtaatatgtttatagctttcatcgacataagcatttccgattacattgatgactttttcgttatcgtcaatcggggcataaattttgatggactgcaatgtgatatcatcatcaacaacgccgccagcctggctgtacgtttcaaacttcaggcctttttcgagaaaaggcacaattttatcaagcgtacgccggtctaaaacggttccttcctccgcgatgatttcgccggtttcagggtctgcgatcgattcagccagccgttgcccgaacaggcggaatttcaggtgaagctttttattcattttgtaacgcccgacattggccagatcatagcgtttcgggtcaaagaaacgcgaaatcagcaggctttttgcattttcaacggtcgggggttcgcccggacggaggcgttcatatatttcaagaagcgctttttccgtgctttcggtattatctttttcaagcgtatttcttaagtactcattatcgccgatcagatcaataatttcctggtcggagccgaagccgagcgccctgaggagaacggtaatcggcagttttcttgtgcggtcgatgcggacataagccacatctttcgcatctgtttcatattcaagccaggcgccgcggttcggaattaccgttgcggtgtagccgtatttcccgtttttgtccattttgctgttaaaataaacactaggggaacggacaagctgggatacaataacacgttccgcgccattaatgatgaaagtccccgtttcggtcattaacgggaaatcgcccatgaatacgtcctggtcttttacttcaccggtttccttattgacaaggcgcacctttacacgaagcggagcagcgtacgttacgtcgcgctctttgcattcgtcgatggaatatttcggttcgccgaggctgtagtcaataaactccagcgacaggtttccggcaaaatcctcgatcggagagatgtcctggaacatttcacgcaaaccttcgtcaaggaaccattggtaagatgcggtttggatttcgataaggtttggcagctctaaaatttctttgatgcgcgcgtaacttctgcgctggcggtgccgtccatactgaactagttgatgtgacaactgattcacccctcaaatcaagcgttttgtttgcatctttcgtcaaacaacaataaagctaaggcaaaaagaaaaagggttttttatgaaaaaaccacatatcgcatgacaatcttatgattttataagtattttccaattcatccaaaatatatacttgacaagtatagcttagattgcataaagaaccttaatctattggcattttatgattttaacatatatgaaatcgggagtcaaatttttttggctttaaaaacaaaatatcctttttcttttccaacacaatttacctcatcaaatatgctttctaattttttcctggcagaaggggctccctgctttttccggatgaccacccaaagttcgccgttgtttgcgagatattggtaactttcttcaaaaatccggtgcacaatctgctttccggcgcggatcgggggatttgtggcaatcaaggcaaacgggccgcttttcacattttcaaaaagattgctttcgtatatggaaacatttgaaatatggttccgggcagcatttttctttgccagctcgaccgctcttgtattaatatccgccatatgcacatggcggccgggaaaagattttgcaagcgcgaggccgatcggtccgtaaccgcaacccatatcaaggaccggcccttccgtttcgggcatggccacaagatcgagcaaaacgcgggagccgaagtcgacttctttttttgaaaaaaccccttggtctgtttgaaaatgaaaggcatgccctctcaatgtaaaggtgaaatctatcggttgatgctttgcttctgggttttgcgagtagtaatgttcagccatgaaaagtcccactctttcttggaggattcaggaagaagagatgttgaaaaaagcccgccaaatgcgggctttttctttaaaaagggccttacttcacttctacgccggctccaacttcttcaagtttcgctttaatttcttcggcttcttctttcgctacgccttctttaagcggttttggagcattgtcaacaagttcttttgcttctttaaggccaaggcctgtgatttcgcggacaactttgatgactttgattttttgtgcgccggcttcagtcagcacaacatcaaattccgttttttctgcagcagcttccccgcctgcagcgccgccagcaacagcaaccggtgcagcagcggttacgccgaattcttcttcaatggctttcacaagatcgttcaattcaagcactgtcatttctttgacagcagagatgatttcttctttcgtcattttcatatcctcctacaagatattttttaaagtatattccgtaaaacttatgcgctttgttcttctttttgatctgcgactgcttttgcagcaagagcaaagttgcggattggcgcctgcagtacgctgagaagcatggaaagcaggccttcccgtgaaggaagcgttgcgagtgctttgatttcatcaacggttgcaacattgccttcaatgacacctgctttgatttccaaagcttcgtggtcttttgcgaaatcattaaggattctcgcaggcgcaaccacgtcttccgtactgaatgcgatcgcattcgggccggtcagcgcgctgttcaatccgtccatcccagctgcttctacagcacggcgcgtcatcgtgtttttatacactttaaattcaacgcccgcttcgcgcagctgtttacgcagctcagttacttcagccacgtttaaaccgcggtaatcgacaaccacaacggctgtacttgatttgaatttatcggtgatttcatccaccagttgtttcttttgttcaattgcactgcccatcttgacacctcctacagatattcttgatgaacatttataccaaaacaaaacctccatatcccgagacatggaggtttcatgcatgcggaggccttaaggcgcccccggatttatacgcattacctcggcaggaaattaagccctccggcacctgctgtctacggtacaaatgtttactttttaaaaccgttcttaattatagcagcccgcaggcagcatgtcaaatcattattttgctgccacaaaagaagacgggtctactttgatgccaggccccatggtcgatgtgacagaaacattcttcatgtaagtgccttttgcagctgacggttttgctttcatcaatgtgtcaaacaaggttgacaggttttcaaccaacttttccgattcaaaagagactttcccgatcggggcatggacattgcccgctttgtcaacacgatattcgactttaccggctttaatgtcctggaccgcttttgtcacatcaaatgttaccgtgccggttttcgggttcggcattaatcctctaggcccaaggatgcgcccgagtttaccaacttcgcccatcatatccggcgttgccacgatgacatcaaaatcaaaccagccctgctggattttgttgacgtagtcagtatcgccgacataatccgcaccggctgcttccgcttcttttgctttttcgccttttgcaaaaacaagcacgcgctgggttttccctgttccgtttggaagcacgacagcaccgcggatttgctggtccgcttttttcgggtcaacgccgaggcggaatgcagcttcaactgttgcatcaaattttgtaaaacttgtttttttcaccagttcaatggcttcctgaaccgggtaagctttggaacggtcaacgagtttcaaagcgtcaacatatttttttccttttttcgccatttgtatttcctcctcgaatgtggttttaacggaataacctcccacgaaaaaggttgcgagccagtatcgcatcgcaaccccgttggacataaccagtactgcatggatcagtcttcgatcgtaatccccatgctgcgcgccgtgccttccaccatgcgcattgccgcttcaacacttgccgcatttaagtcaggcatttttgtttctgcgatttcacgcactttgtcacgcttcacagttgccacttttgtacggttcggctcgccggaaccggattcaatgccggctgcttttttcagcagaactgcagctggcggggtttttgtgatgaatgtaaatgaacggtcttcaaataccgtgatttcaacaggtataatcaagcctgcctgatctgcagtacgagcgttgaattctttacaaaatcccataatattgacgccggcctggcccagtgcaggaccaacaggcggtgcaggatttgctttaccggcaggaatctgcaatttaacaatttttactacttttttagccacgagacacacctccttaagtccgtgatgtggtaacaggggctgagccctcccactcatctatttgattgaaccccccacggctgaagccgcgagcttcctgcagacaccgaaacatgcttcgttgtcttcgcaggctatccccgcaagttcctgcggttagccggacaattggcaagacaaaaaggcaagccatatccgaagccaattcatctcatgaccgtgtcacgagtgtatcataagaatcatgtgattgcattgtgtctgttcatgcgggtgcccggttaggcgggccatccgcaaagaacatactgacttataacatattaacatctcagcacatggatttcaagttttatcccgttatattttatcaatttgttcaaaaacgagttctaccggtgtatcccgcccgaacatattgaccatgacttttgccctacctttgtcgcggtccatttccacaatcttgcccgcaaagtttgcaaacggcccttcttttaccgtaaccgtctcgccgatttcaaagtcaacatcggcccgtttttcttccatgcccatccgtttcaagatggtattaatttctttaggcaaaagcggcgtcggcttggaaccgcctcccgacgacccgacaaaaccggtgacgcccggcgtgttccggacgacataccaggaatcatccgtcatcaccatctccaccaggacatagcccgggaaaacttttcgtttcaccacttttttcttctcattcttcatttcaagttcttcttcttccggcactactacccggaaaattttatcctgcatccccatcgattctacgcgcttttccaaattggttttgactttattttcatagcctgaatacgtatggacaacataccagtttttttccatctaataggacttgatgtccgtccctccctgttggtcttttgattttttgggcaaatgaaaaaacccgctaatcgggtttgagtcgttgcttatgatactcccattataccatgttttatcattggatattcaagtgtaaaatgatcattttacaatgagttttcagcccaccggatcactgcggaaatgccgagatcgatgacaataaagaacaatgtcaggaaagcaaccgttacaaggactgtaatcgtgtatttgaccagctctttgcgccccggccagctgacttttcgcatttcggaagctacattacgaaaaaattttgtgatggacatgtatttaagacctccaagtaagctcatgttcgttgttattttgtgccgcggtggatggtgtgttcgttgcagtgcttgcaaaacttctttaattccattctttcagcctttccgttgcccgttgtggtcgtgtaattgcgcgaaccgcaaaccgaacaggcaagtaccatttttttctgcatctcatcaccagctgtcttatggtcttacggcgttaacggaacctgccgctgtaaagaacctctcccggaaaaccgggagagtcttttgggcgccgccggttccgtaccggtatcgtatcaaaacataaaatcctacaaatcaacataacacggcagaaagcttgtgtcaatcagtagcagaagaaggcagctctgaggagtaaaaannnnnnnnnnnnnnnnnnnnnnnnnnnnnnnnnnnnnnnnnnnnnnnnnnnnnnnnnnnnnnnnnnnnnnnnnnnnnnnnnnnnnnnnnnnnnnnnnnnncatcgttgccttggtgggccgttaccccgccaactagctaatgcgccgcgggcccatctgtaagtggcagccgaagccgcctttcctttttcctccatgcggaggaaaaaactatccggtattagccccggtttcccggcgttatcccagtcttacaggcaggttgcccacgtgttactcacccgtccgccgctaaccttttaaaagcaagcttttaaaaggtccgcacgacttgcatgtattaggcacgccgccagcgttcgtcctgagccaggatcaaactctcagtaaagatgtttgataaaagctcaaaaagaatttgacgtttcgttttgtccagttttcaaggaacaatcgcttgtttttcagcgacttttatatcttatcatgatgcaaccagcatgtcaattactttttttggaaagtttgatgccggaagcagcggcaaaaattattatactaagatagggaagagcagtcaatcctttttttaatttgtccagttattctacgtcagaaccctggtgcttttccattctgagcttcaggtaccttcgcataggcaaaaaaaatcgccaaagaaatgtttaacatttctttggcgcacgtgtttgtctgctgatggcggtcaaacgccgcttttgtcaggacagaatccacgtctgaatgacagtcaggccgatgaccccgggtatgccgagcaggccggaaacagatacggttgctgcattgatcggaacatgcagcccgtaccggccgcccacctggtttaaaaagaaaaggagtacagccccgatgatggctttgatgcacaactttcccgcccatcgcaacggtttggttaaagctgcggaaaacagcagcaaaaggatcaggcctacaatcgcaataatgatgatggttgagctcaagcggatcaccccttttttccggctgctttatttttatgaaggagttgtccaaaaaagaacttgagccgtgctgcccttactggaggcgaatatttcttcttttcacttcccgaaaaagaaacacatattttgcttcggccactttggtgcggaagtaaagttcttcattaaattcaaaacttagattctggagggcattttgctgcacccattcattttttacgtttgtgaccaaatcaagaagaagcgcatcgtatgctttcctgagtttttgcttcttactgaacattgtatccaccccgtcaggttaaatttctcttcggccttccagtgcttttgataaggtgacttcgtcggcgtactcgagatccccgcccaccggcagcccgtgcgcaatccgtgtcactttaatgccggacggttttaaaagccgcgaaatatacatggctgtcgcttcaccttcgatatttggattggttgcaagaatcacttcctggacggtttcatcgcgcaggcgtttgagcagatccggcacactgatgtcttcagggccgattccgtccattggcgaaatcgcaccatgcaggacatggtaaaggccgttgtattctttcattttttccatggcaatgacgtctttcggctcctcgacaacgcagatcacgcttctgtcgcggcgcggatcggcacaaatatagcacggatctgtatcagtgatatgcccgcaaacggaacagtacgtcagatcccgtttcgcatcgacaagcgccttggcaaatgcaaggacgctgtcttccttcatatcaagaacaaaaaatgccagccgggccgcggttttcggcccaatgcctggcagtttcatgaagctttccattaattttgtgattggttcagggtattgcattgttgatcacacctttaaaatcccggaatattgaagcctttcgtgtacttgcccatcgtctgctccgtcagctgttcaactttatccagggcgtcattggtggcgacaaggatcatgtcctgcagcatttcgacatcgtccggatcgacggcttcttcattgatgcgcacttccagcacttttttatggccagaaacgacaacggttaccatgccgccgcctgccgtaccttccactttctgttcgccaagctgctcctgtgcctccatcatttctttctgcatcttttgcatttgtttcatcattttttgcatattgcccatattgcccattcctcgcatatgaaaccctccagttttagtcttttatttcaattaattcaggcccaaacaatttgattgcttcggttacaaccggatcatcctgcggtttttcttcctctgcttcttctttatggtggtggatataattttccctgatcgtattccattcattttccggaacgcccgcagcctggtacccggttccggttaattcactgagcacgctcgaaatcgcttgtaaaaatttctcgttttccatcgccatctggcaatggatctcatatttgaatttgatgacaaaagcgttcggcgacgccgccaccggttccgcttcgtttaaaagcgccgcctgcgaccgcatctgcctgctgttgagcgtctcaatcatatcgttccaactgtttttaatccgtttgagatcctcttttgtcgcttcttttaatatatcatgaatccttccgacttgtaccttaaaacctttcgaagtgcgcggaatttttctcggggcctgccgttttggcgcatcttctgtttcatccgcctccggcaccccgttttgcttgagagactcgagttctgattcgagccgttcgattttttcagcaagtttccggatgagatcattttccccgggatctggcgctttttcttcacaaagtttgataaaagccacttccaaataaacgcgggccatattggaaaaacgcatatcctgctgcgtttggttcaggatgtcaataaaacggtaaatttcctgcgtttgaagcgagcggctcatttctttaaacgcctcatctaaataaaccctttgaaccgcttcctccatctgcggggcagttttatacaaaagcagatcgcggaaataaaggatgaagtcttccacaagccttgaaggatcttttccctgctggagaagagaaccgacaaggtcaaggcattttgcagcatccttcttttgaattgcctgcgcaaggcgggtaaaatcattctgggaaatggaacccgttaccgtgagcgcatcttccactctcactttcccctcgctgaaagagacggcctggtcaagcaggctgagcgcgtcccgcatcccgccttccgcagcatgggcgataatattgagcgcctgttcatcatatgcaatgccggtttcgcctgcaatataagccaggcgtttaaaaatatcacgggatgtgattcgtttaaaatcaaaccgctggcatctggaaacgatcgtaagcggaattttatggggctcggttgttgccagaataaaaatgacatgtttcgggggctcctcaagtgttttcaaaagtgcgttaaatgcgccgatcgacagcatatggacttcgtcgataatatatactttatatttaacaacacttggcgcgtatttgactttgtcgcggatatcccggatgtcatccacgcctgtattcgacgccgcgtcaatctcgatgacatctgggatcgtgccgtctgtaatcccccggcaggcagcgcattcgttacacggttccccggtcggagcatgttcgcagttcaccgcctttgccaaaattttagcggcacttgtttttcctgtaccccgcgggcccgagaaaagataagcatgtgttgttttctgttgcaggagggcatgctgcaatgtttttgtcacatgctcctgcccgacgacatccgcaaaccgctgcggccgccatgtgcggtataacgcctgataagccatgatcaatcctcccggccagatttgcttccgactcacacatttcttttattataccttaggaaaagcgattttacatcccgaatcgaaaagcattcaaatatggaaaaaacccatcccggatcaggatgagttttgttttttatgtaatgaaactgccgcgcacctttcttcgaccgaccctcataagcgttacttaagcagttagctcgacccaggctgccctgcggcacatggaatgacccgcttaatgctgcttccttccggacctgacatggttcgcggggttccattgcgcaggacccgggtgtcaacaccacttacttaaggctggccctacaagcagccggcctcggaaagggattcagtcccgctggagcggattgcgggtacagggcaccgctgcctccccacctagcgcggcaaaattgataccagtttaagcgttaaaaactaacgcataactaagtatacatgtcttttttaaaaaaagcaatctctcccgcctgttaattggtggggctttttccatcttcctctgccacaaatttttccttctttttcttctcccttaaagaccggaaaaaggaccgcaatagctccccgcattctgtttcaagcacaccgcttacgacttcgctccggtggttaaagcggccgtcctcaagcaggttcatcaaagttcccgcacagcccgcttttgggtcttttgccccgtaaacgacccgcttgatcctcgattgtaaaacggcaccgctgcacatcgggcatggttccagtgtgacatacaactcggcattttcaaggcgccatgatccgatcacttcgcatgctttttcgatggccagaagttccgcatgggcggcagcacgctgggtggtttcgcgcaggttgtgggctgcagcaatcactttttcatcgagcacaatcaccgccccgatcggcacttcacggagatgctgtgcttttacggcttcctgaatggcaaggcgcatataatattcatcgcgattttccatccaaactcctccaaaaggtatcgtagccttatcgtaacacagccttgaaaaaaatcacacttggtttggccataagttttacaccggctttcttcgggcagaagggtcctaacatgaagaaattggatgctctttcgttactgagcacttatatgttagggaacattgcaaaaaacgttcactttcccaacttagagggctcctgcgtcaggaagcgccgcaaaaaatcattcgcttccaccggccgtggcgttcagcaataccgcaaaaagggtttgctttatgattccgcgaaaaaatgcgcacataaaaagcgggcatgttttaaaaaacgcggcataaaaataacaatagcgatggctgacacgaggggggactcgtttgcaaatccatgttgtcgaaagaaatgacacggtctcaaatcttgcgcaaagatacagcgtcccggcttgtcatcggacaggcgattgtcatcccgatcaccgggaggttttattgggtccggccgggggacagcttatattccattgcacaacaagcagggatatcttaccaggaacttgcccgcatcaacggcatttctgtccatcagcagctccggcccgggttgcgcctttatctgccgccttcctcgaaaaaaagagcagaatttaatgcgtatgttgaaccattcgggaacacggtttcagcgtctcttgaaacaagtgcgcgaaaagcggccccgtatttgacctatcttgccccgtttgcattccgggtaaaccgagatggcacacttgttgccccgccgcttggaaatttgcgggcggttgccgatgcccaaaacgccattttaatgatggtgatctgtaatcaggaaaacggccagttcagcgatgaactcgggcggatccttttgaacgacgaaaccgtccagaaccggtttttaaatgaaattgttcaaaccgcaagccggctcggtttccgtgatattcattttgactttgagtatttgcgcccgcaggacagggaagcttacaaccggtttttaagaaaagcaaaaacgcgcttcagccgggaaggttggctcatgtccaccgcgctcgctccgaaaacgagcgccacccaggccgggcgctggtatgaggcacacgattacagggcgcatggcgaaattgccgattttgttgtcattatgacctacgaatgggggtatagcggcggcccgccttgccggtgtctccgatcgggccggtccgggatgtgctccgctatgccatcacagaaatgccgcccaataagattttgatggggcaaaatctgtatggctatgactggacattgccctatcaaactggcacaacagcaagagccgtcagcccgcagcaggccatccggctcgcgggtgcgcacaatgtgccgatcctgtatgacacaacatcccaggcccctcattttaactagtttgttaaaaccaacccaggaaacagccggaagcagaacgccgggacacatgatcgctttttttcccgcatgccaaccggcggagacttgtgctaaaatagcaacagtgtgcatcaatgaacaatcgcttcagcgggagggcgttatgaaaagggtaccgtttattgcaatcgagggaccgatcggcgttggcaaaacgtcattggcaaaagccatttcatcatacttttcgtttcagcttttgaaagaaattgtggatgaaaatccttttcttggaaaattttataccaataaagaagaatgggctttccaaaccgagatgttttttctctgcaatcgctacaaacagctggaagaccttaaacggcataggcagcctgtcgttgcagattaccatatttttaaaagcttgatttttgcccggcggacgctaaaaacgcatgagtttgaaaaatttatgaaaatttacggcattttaacagccgatatgccgcagccgaacgtcatcatttatttgcacgcaagcctggaaacgctcctcaagagaattgaaataagagggcgggcatttgaaaaaaatatgcaggaaacgtatttacaaaaactatccgcagactacggccggtttatgagccgcttcgaagccggccatccggacatcccggtattaaagttcgactgtgatacacttgattttatccggcatgaacatgacctgacatacatgctgcaagaaatcgcgcaaaccttacaaaaaggagtacatacccatggaacttcgtgagaaatatcaaattccgaaccacgctgtgatcaccattgcaggtactgtcggcgtcggaaaatcgactttaacgcgtgcgctcgcgaaggcgctccatttccgggcgtcctttgaaaaagtcgacaccaatccgtatttggaaaaattttatagcgattttaaacggtggagtttccatcttcaaatttattttctggcggaaaggttcaaggagcagaaaaaaatgtttgaatacggcggcggttttatccaggaccgctccatttatgaggataccggcatttttgcccggatgcattatgaaaaaggcaatatgtctgccattgattttgaaacctatacaaacttgtttgatgccatggtgatgaccccgtattttccgcatcccgacctgatgatttatttggaaggcaagctggaaaacattttggaacggatcaaaaaacgcggccgtccaatggaacaagatacccctgttgaatactggattgaaatgcagaaacggtacgagcagtggatcgactctttccatgcctgcccggttctcaggctgaacattgacgaatacgacctgtttgaacatgaagatgccgtcgaaccgattgtcgagcggatcggctacatgctcgcacaggcagcagccgtaaaaaaataatagcggctaaaaacccgttaccatcgcgtaacgggctttttaatgatttacggagggatcacgggcatgcaaaaaatgtggtgtcttgtccttactccacgaaaaaagcccacagctcccgccatttcagggtgccacaggctttcaatcatagtccttttcatttttcaagcggaggaagagggattcgaacccccgcgcggtgtaacccgcctgtcggttttcaagaccgatcccttcagccagacttgggtattcctccattttgacaaaaaagattataacctacacgatcaaaacaagtcaagcacatcaagattttctactgcggaaagccatctgaattttagccaagggaaggccccggaacgcacatttagatatggccgtttttctcttgtccgcccttttgagtaaaatcccgccctaaaaaatgcggaagcttccggaaaacatgtttcaaatccccggcttttcatgtaaaaaagccggggatttttttatgattctggtttgatgatatcgatacgcatgtacgggcggagcacttcgggaaccaccacgctgccgtcagcctgctggtaattttcaaggatggctgcgacggtacgcccgatggcaagcccggatccgttcagtgtatggacatgttccggttttgcattgggttccctgcggaagcggatgttcgcacgccttgcctggaaagcttcaaagttgctgcacgaagagatctcgcggtatacgtgctggcttggcatccatacctcaatatcatattttttcgctgccgtaaacccgaggtccgccgtgcacatgctcatcacatgataaggcaggcccagaagctgcagcactttttccgcatgacccgtcagtttttcaagctcctcataggaatcttccggtttgacaaattttacaagttccactttgttaaactggtgctggcggatcagcccgcgtgtatcgcgcccggcagaacccgcttccgaacggaaacaggcgctgaatgccacataattgatcggcaggtcgccgccgtttaaaatttcatcacggtgataatttgtcaccggcacttcggcagtcgggaccagaaaatagtctttttcattgacaagaaaagcatcttcttcaaatttcggcagctgccccgttcctgtcatgctggcgcggttcaccatatacggcggcaatacctcttcataaccgtgttcttcgacatgcaaatcaagcataaaattataaagcgcacgttcaaggcgggcgccaagccctttgtaaaagacgaaccggctgccggtcactttggctgccctttcaaagtcaaggatgccaaggtcagtggcaatatcccagtgcggtttcggttcaaatccaaatgccggcacttcaccccatttccggatttcgacattgtcctcttcgctgtctcccaccggcacgctttcatgcggaatgttcggaatagaaagcatcagcatttcaagttcggcctcgacttgtttcaactccgcatccagcgctttaattttctcgccgacgccgcgcatttcctcgatcagctttgttgcatctttcttttcgcgtttcagtgccgcaacttgctgcgtgacttcattccgcctgtttttcaacgcttcgctttccatgatcagttcgcgccgcctttggtccagcccgctgaacttttcaaaatcggtcaaatcttctccgcggtgctgcatccgttctttgacttcatcaaaatgcgcacgcaaaaatttgatgtccaacatgctatccttctccttttatcgaaattcaaataaaaaactcccgccccgaaaacagggacgagagtgaacccgcgttgccacccaaattgaaaacaagagttttccgctttgtaaggataacgggttttttcccgtggatgcctactcgcccggctttcagcaacccgctcaaggatggattcacagaagctttccgccggtttccaccgcccaccggctctctttaggaaaagcgttctcctactggttcctgtcattgctttttcagtcttcacgtacaccttaatgtactacaattttatccgttttgcaacagactataccggaatccttgccatactcaaaaaatattcggtcatccgcaggtcatccgttaactccggatggaaggagcagccgagcagatttccctggcggaccgcaacaatccgcccgcggcactcggccagcacttcaacatgatcggaaacggaaacgatatggggcgcgcgaataaagacagccgggaaatcttccgcgatgccgttaacacggattgtttcttcaaaactttcccgctggcggccgaaagaattgcgcgccaccgtaatatccattgcgccgatatgcgcatcttcctggccttcaatacgctttgcaagcaggatcagccctgcgcatgtgccaaagaccggcttactttcggcaaactgtttcagttccgccataaaaccgtagcggtcaatgagccgccgcattgccgtgctttccccgcccggcaggatgagcccgccgatttcgtccaactgctcttttttcttaacgacaacaccttccgccccgcaggcttccactgcacggatatgttcctccacagccccctggaggccaagtacgccaatttttttcatgctgattctccttaccagccgcgctcctgcattcttgcttcagccggcaatgttgaaatttctaagcctttcattgctgttccaaggtctttcgacaattcggcaatcagtttgtaatcttggtagtgggtcgttgcttcgacaatcgctttcgcaaatttcgccgggttttccgatttgaaaatccccgatccgacgaaaacgccgtccgcaccgagctgcatcatcaaagccgcatccgccggcgttgcaacaccgccagcagcaaagtttacaaccggcagccggccttcttttttaatttgcagcagcacctcgtacggggcaccgagctgtttggcttccgtcatcagttcatcttcgttcatgttgaccactttccgcacctgcgcattcactttccgcatatgcctgaccgcttcaacgatattcccggttcccggctcgccttttgtcctgagcatcgaggcgccttccccgatccttcgtgccgcttcccccaaatcgcggcagccacacacaaacggcaccgtgaattcttttttattgatgtggaactcatcatcggccggcgttaaaacttcgctttcgtcaatataatcgacgcccatcgcttcgagcacccgcgcttcaacaatatggccgatccttgcttttgccattaccggaatgctgacggcgttcattacttcttccacaatggaagggtccgccatacgggcaacccctccggctttccggatatcggaaggaacgcgttccaatgccatgacggcaacagcgcctgcttcttcagcaagttttgcctgctcggcattgaccacatccatgatcacaccgcctttctgcatttccgccatcccgcgtttcactatatctgttcctgttttcatcttttgtacgcccctttataaaattaaaaattcttattatatgtataataatttaaattaacaccaaaagcgaatgcttgtcaaggcactcatttttccacgttaaagtgaaaaacaggacaagggcccttgtcctgtttttttacttaaaataatttaccggctgtatgatcccaaagtcactcgaaaaatccgccaattccacgcatcatacgcacaaaccagttggctttttcaatatcggttttggtaaccaaagcggtgtgcgctgtacccgggccgtacaaatagccaagttcctgcccgtctttatgccgggcatacaatgtaccgacctttgtcccctttttcaccggcgctgtgatttgttttgaatcaaatttcacaacaggggtgtacattttgccttccccgtttttcacagccactttaagcggcgccttcgtgacaacggaagcctgtttttctttgccggacttcaccgttaccgtctttttcacctgatagcctttcgggtaaagggttttttctgtgaaattattaaaagcataatccattaatttgtttgtgacatcaaatcgggacttgatggtgctgttcccgttcgcatcctctgcatgaagaacgacggtaatgatgcgcatgccgttttgcttggccgtgcctgtaaagcagtatcccgctttgtcggtgttcccggttttcaacccgtcaacgcccttccgcccgtaaacaagggacggaatcatccagttccagttctgcatcgcaatttcatcatctgtcccggcccggaatttcattttggccgtgcttgttgtttgtaaaatctccgggtagtcgtggatcaaatggtaggcgatttttgcaacggattttgctgagacaaggttttcttccgtcctgcctgtcccggccggctgcatgccttgcaaatcctcattgttcagcccggttgcgttcacaaacttataatgggtgaggccgaatgctttcgcttgtttgttcatcatgttcagatagtttttttccgttccgccgagcgtttctgcaatcgcaatcgttgcgccgtttgccgaataaatcgccatcgcttggaaaagctctttaaccgtgtacttttcgccttttcttaacggcacatttgaaagtgccctgttttgggaaatgcgatacgcataatcgctgattgtcactttctggttccacgaaacctttttctcatgaatggctttaagcagcaaatactccgtcatcattttgctcatggaagcaatgcccagcgcctgttcggcatttttttcatacaaaatctgcccgttatccgcatccacaatgatagccgcttttgcatgaatatccaactggtcctgcgcatgggcttttttcggcacctgctgcacaacccctgccgataacagcagcaccagaaacgcaaatgccattttttgcaagctttttttcactttcaaccctccatcaagatatgtatacactttgcctattttaacatagttccggttgaaaaagtagatgcatagagtttgccgtatttgtcagctttttccgaaaatgcagggcagccggtacagggctgcaactctattaaatggtagaaaaaaacggcaggaaaattgcctgccattttgtttcccattcaaaatccatgttaagataaagaataattcggtgcttcttttgtaatctggatatcatgcggatggctctcccgcaggcctgcccctgtcatgcggataaactgcgcttcttcacgcaaggaaatcatatctttcgcgccgcaataacccatgccggaccggagcccgccaattaattggtagatgacatcctgcaggctccctttaaacggcacgcgtccctcgatcccttccggcaccagttttttcgcgccttcctggaagtaacggtccctcgatccgctttccattgcgctgattgaccccatgccgcggtagactttatattgccgcccttggtaaatttccatttcgcccgggctttccgatgtccctgcaagcaggctgccgagcattacggcatgtccgccggcagccagcgcctttacaatatcgcctgagaatttaatgccgccgtccgcaataatcgctttcccgtactttcttgcttccgtcgcacaatcataaaccgccgtaatttgtggcacgccaacgccggcaaccactcttgtcgtacagatggagcccggcccgatgccgacttttacaatatccgcgccagcgtctatcagcgctttcgtaccttccgccgtcgcaacgtttccggcgatgatatttaaagaagggtaagatttgcggatgtttgcgacggtttccagcaccccttttgagtggccgtgcgccgtatcgatgacaaccgcatccactcccgcttcaacgagcaattccacccgtttcattacgtcacttgtcacgccgactgccgcgccaacaagaaggcggccctggtcatctttggctgcatttgggaactcaataaccttttcgatatctttaatcgtaataagcccttttaatacgccgttctcatcgacaagcggcagcttttcaattttatgccggtgcaaaagctgctccgcctctttcagcgtcgtgcctacaggcgcagtcacaagattctctttcgtcatcacatctgaaatccgggtggagtaatcttcaataaaacgcatgtcgcggttggtcaaaatcccgaccagtttctgctcgtcacggttatttacgatcggcacgcctgaaatccggtatttgcccattaaatgttccgccgcaaacacctgctcatcaggagttaagaaaaacggattggtgatcacgccgttttctgaccgtttgacacggtccacctgctccgcctgttgttcaatgctcatgtttttgtggataatccctaggccgccctgccttgccatggcgatcgccatttccgcttcggttaccgtatccatgccggcgctgatgatcggaatgttcaacttcaaggtttccgtcagcgcgacacttgtatcgacatctttcggcagcacttccgattctgccggaatcagtaatacatcatcaaacgtaagaccttcttttacgaacttcgtttcccacatgcaaacccctcctggattgataaaaatattatttgtaggttatcaattggacataatactgtcaaggtctccaaaacatataatactattcagttaattcggagggcgaaatattgtcttttatggaccaatgggatcacttgattttatttcaatccgcggaatatacgcagcgctatttgaaagcccgctatgaggattcggattttagccaaagcgccgccaaaagctatgagaactgctatgcttttatgtattatctcgaacacggtgaagcttattaccgccaggctatgcaggcgcccgtttcgattcagcctgttctgattttttacggcttcattcatttattaaaagcctgcctgctgtcatgcgacccgctgtatcctgaaaccacctccgtccttgcccacggggtgacatcgcgaaaaaagaaaaaacaaaactaccggtttggcgaagacgaggttaaaattcaaaaaaccggtttatgcggccattttgcccaaaaaatgttcgggctcggcccgctcgaaggcaataaatattccatgcagagcctgctccggcaaatcccggaacttgaaacggccctcccccgccggaaatattttgtgccggtaaaagaaaagaacgggaagtaccggcttccttttgcagtccttgatggctaccatatgacagtggacaggttttcacaatatttgtccgaaaaacttcagggcaggcttttggaaatggaagcggaagatggcgccttctccttttccacccgtggctgtctccctccgccattccgttatcatttctttacaaatcaaatttgctttccgtgtaaattacaaccggagaacgaccttcccgatatattggtccattacctgcttttatataatttgagcatgatttcccgctacgaaacagaatggtgggcagaactgcttaagaaccgggaaacgattgactttccggccatccgcctttttctccagacggcaatcgaaaaaggcccgttcctctgcctgcagtttctaaaggggatacgttaaacaatttcgccaaacttaaaggggaaactgattcttacggacaagagcaaaatggaacgattcaccggctatctgtgtgtacttttcggccgatttctaccatcaagaagaccttgcaagttgaaaaatccctttccggctcctcatttgataactttgagcaaaacggggtgcattccgaaaaaagcaggagccgagtacatttcccaataaaaatatgcaaaaaccgcagacaaatcgcctgcggttttttttggcccggcaacgtcctactctcgcagggggaaacccccaactaccatcggcgctggaaagcttaacttccgtgttcgggatgggaacgggtgtgacctttccgccaaatttgacgtttcgttttgtccagttttcaaggaacaatctaagttgttttctaagcgactttaatattctactgcaaacaaatactattgtcaacaactttttcaaatctgtatttttaagcaggcatttaattagccaacgaataatactataccatgtatttggtacgaatgcaacagcttttcgccatttatttttcaaacaagctgaagcctgctctctttcagcaaaacaagaaaaaggcttaccgctggccgtagccaatacaattcacaaaaaaccagccgcttgaacgttaatattatattaaaatgatgtttacaaaaagcagcggttcctgccccgctgctttttgtaagttttgctttgcttaatccctgcttttcattaacgggaagagcagcacgtcccggatagacggggcattggtcagcaacatgacaagccggtcaacgccgatgccgagtcctcctgttggcggcatgccgtattccaatgcttcaataaagtcttcatccatttggtgcgcttcgtcattcccctgctcgcgctctttcagctggttcacgaaacgttcgcgctggtcgatcgggtcattcagttcggtgaaggcattggcatgttcacggccgacaatgaacagttcaaaccggtctgtaaaccgcgggtctttttcattttttctagcaagcggcgagatttcgaccgggtgcccgtaaacgaaagtcggctggatcagtttttcttctaccctttgctcgaaaaattcattgacgatatgcccgtattccatatgttccgtgatttcaatatggtgttcttttgcaagtgcccttgcttcttcggtgcttgtcacattccagaagtcgacgcccgtatattctttaattgcatcgaccatatgcaggcggcgccattccggttcaagatttacttcatgttcgccgtaccggatggcggtggtgccgagtacttcttttgctgtgtgcacaatcatgttttcagtcagctgcataatatcgttaaaatccgcatatgcttcgtacagctcaagcatcgtgaattccgggttatggcgggtatcgattccttcattgcggaaaacgcggccgatttcatagactttttccaacccgccgacaatcaaccgtttcaggtggagttcaatcgcaatccgcatataaaggtcgatatcgagcgcattgtgatgggtgataaacggccgtgcagccgccccacctgcaatggcatgcatcattggcgtttcgacttccaaatagccgttcttgttcaaataattgcggatggactggataatgcggcttcttgtaatgaacgtgtttttactttcttcactcataatcaggtcgagataacgctgacggtaccgctgctcgatgtcccgcaggccgtggaatttatccggcaacgggcgcagcgcttttgttaacagaataaattctttgactttgacggacaattcgcccacttttgtccggaaaaccgtgcctttaagcccgacaatgtcgccaaggtccgtgcttttgaataactcgtactgttcttcgccgactgcgtcctggcgaatataaaactggatttgccctttcaagtcctggatatgggcaaacccggcccttcctttccgccgttttgtcatgatccgcccggcaatggcaactggaatctctttttcttccagttgttcttccgtgcattcaccgtatttttgttttaattcttccgtgtcggttgtccgttcaaaacgcttgccgaacgggtccacccctttttcgcggagcgcctccattttttctttccggaccagatactgttcatttatattttcgccactcatcttttttcctccaatcgttaaaaatgccggccaatatgatagaaaaggaaagacgtctttccttattttccgccctcttcaagtatgaaaggttctgccgcccaacattagccattatagacgtatacctctattattgtacacaatctttcgcgttcagacatcctttcaccaggttttttctttgtatgtatacaagcaagtactgccgggattcctccggcagtactccgttacatggcctgtcgttgtttccgtaccggttatacaccaatccgtatttcagtataaagccgccgccgggttgtttaaaatgcccgggggtaccctttatggcaagaaagcagtatcccctgtgatctgtttccacagccggacgccttctttgtctgcgcattttttcagcagctccgcatacgggattttggttacagggtcgcaaagtgcattgtccaattccgtgaggggaaccaaaacaaatgcccgttcatgcatgcgcgggtgcggaatggtaagattctctgttttcatattttcctgattatacaacaaaatgtcaaggtctattgtccgcggcccccaatgaattttcctttttctccgtaactttttttcaatctcaaggcaggcagcgagcaggccaaaaggggataaccccgtttcaattttgacagccatgtttaaaaactgtccctggtctgtgtacccgacaggttcggtttcataaatggatgaagctttgcaaacctttatgcccgggttgtttccaagcaaccggacggcgtgctgaagataatcaaatcgcggttcaatattggatccgagtgccaaataagcgagattatccattctttcttctccttgtaatttctaccgcaacggacttgtaatggccgggaatgggcgggtccggtttggttactttgactgtgacttccgcaactttttcatataaagcgagaatggaagcagccagtttttctgcaacagcttcaaggagcttgaaaggctgcccttcaacaattttttccacgcatgcatagacatccgcataactgacggtttcttccagccggtcggtttcgcccgcccactttaaatccagaccaagcacgatggatacacggaagcgctggcccagtttgttttcctcgggcaatacgccgtggtaaccgtaaaattccatatcatgaatataaattttatccatcctgttccccttttccgacgagggcgtccatcattttcaccattctgcttacgggttttacatcgtggacacggaccatatggcagcctttcatgatgccaaagcagcataccgccccggtgccttccattctttcgccagtcggcagcccgagcacgcttccgattatgcgctttcttgaagcagcaagcaggacgggatagccgagtccaacaagtttgtcgaggttccgcatcatttccatgttttcctgaaaacctttcgcaaacccgatacccggatcgaggatgatttgccggtcttcgacacctgctttttttgcaatcgtaatgctttcatacagatcgttcaaacagtcccgcataaaatgttcatattgcgggttttcgcggttatgcattaaaataatcggaacatcgtactgtgcggctacatcggcgatttccggatcccgttttgccccccatacatcattgatgatatgtgcgcccgcttttattgcttcttccgcagttctcgctttatacgtatcaacagaaagcggcgcctggacttttcctgccacagaatgaatgaccggcaagattctgtccagttcttcctccgctgatatcggctgatgccccggccttgtcgactctccgccaatatcgagcagatcggcaccgtcctgtaccatctgatacgcatgttccaccgctttttcaggctgaaaaaaattccctccgtccgaaaaagagtcgggcgttacatttaatatgcccatcacataggtttttcgggtaaagtcgaacgtaaacggaccacacttcaacttctgttctccccttttctcagttcaataattatagtctaccacatccgcagccggggattaatacgatatgcaaagatgccggcttcccgcagcgggcccgggtcctgcactgaaaatcccaatctttactgttcaggcaggaagggggttgcgtttcaacccgcatacataggtttgcgaaaagaaaaacccgcgggggccgttcctccgcgggttttgccgttcttagtcttcaaactggtaaagcggggtactcaaatagcgttcgccggtatccggaatgatggcaagcacttttttgcctttgccgagttttttcgccacttcaagcgcggcataaacagcagcgccggaagaaatcccgccgagaatgccttcttttgcagctgtatcttttgccgctttgaaagcctggtccgttgtgacacggataatttcatcgtaaatttctttatcgagtgtttcagggacaaagttggtgccgatcccctggattttgtgcgggcccggtttgccttcagacaacagcggggagtcatccggttcaaccgcataaattttgatgcccggataagcttcgcgcagcgcctggccagcccctgtaatcgttccgccggtgccgacaccggcaacgaatgcatcgagctggtctcccatttgttcaataatttctttaccggttgtcaaacggtggatttccgggttggccgggtttttgaattgctgcggcataaaatagccgttttcttttacaagttgttccgctttgtttactgcacctttaatgccttcagagcccggggttaaaacgagctttgccccgtatgcacgcagcaggctgcggcgttccatgctcattgtttccggcatgacaatgacagctttgtatccttttgcagccgcaatcattgcaagcccgattcccgtgttgccgcttgtcggttcaacaatggtgtcgcctggttttaagcgccctttttgttcagcgtcttcaatcattgcaagggcaatccggtctttgacactgctggccggattgaaatattccagcttcaaataaacttctgcatcattttcatttgtcagacggtttacttttacaaccggtgtgttgccgaccaattcagcaacagagttcacatactttgccaaaatcatccactccatattccgagtatttttattggtttaatatctaaaaattaacatctttttacgcaattgtcaaccaaaacgccttgctattctatgacaaagtgcctaagaaaacggaaacggcaaagagtcgcttttttagccactggcgccgggtcttcttgatcaaacggcggggcaagcttccggcaatcgaacaggccggccccggttagccaacttggttaaaagctgcctattcgcgctcgaggggcccgcattcatctgaaaaggaaggccgttttgctgaaaatctcctgccctcacggcttttaccttacccttttgcttcttcaagcatttgttccagatcttcacgactgaaatggtatttttggcggcaaaaatggcagacggcttcagcttgtccgtcttcctcgatcatgtcccggagctcctgtttgccgaggccgatcatggcagaagcaaatttttctttggagcaggtgcattcaaaccgtactgccattttctccaatatctgcacattttctttgccgagcagatttgccaatatttcttccggcgaaagcccctcgcggatgagttcggaaatcggcgcggtatcggaaattttattttcaatttccgagatgactttctcgtctgttcccggcatcaactggatgataaacccgccggcagccagaatcgtgttgtcaggattgaccagcaccccgacaccgactgcagatggcacttgttcggaagcggcaaaataatacgtaaaatcttcgccaagctcgccggatacaagcggaacctggcctgaaaaatgctcgcgcagtccgaggtctttcacaacggtaagcgtcccgtctgtcccgactgcacgccggacatccagctttccttttttgtttaaatcaaaatgggtttgcggattggtaacatagccccggacttccccgtgtgcattcgcatctaccagaatgacaccgatcgggccgccgccttccactttgatcgtaattttttcatcccccttcagcatggcccccatcatcgcccctgctgttaacgttctgcccagcgcggcggaagccgtcggccaggtgtagtgcctccgttgcgcttctccaacggtttccgttgtgtccgcagcgtatgcccggacctgtccgtcatacgctaatgctttaattaaataatccgccaaaagaaaaatcctcctttaatgctgtaagtttcggttataaatcaagtgcaacccttttaaagtcaaaaattggtcgacaatatcaatgctttttgattcttttgcaatgaggggcgcatgcccgcctgttgcaatgacgaccgggtcttttttactttttgctttcatccgggacacgataccttcaacctgcccgacatagccgaaaacaatgcctgcctgcatggcgctgacggtgttccggccaataatatcatccgggctcgcgatttctatccggggcagttttgccgctctcgagtacagggcttccgccgagatgctgatgcccggcgcaatggctccccccatatactgcttttcctcgttaatataacaataagtggttgctgtcccgaagtcgacaataattaacgggctgccgtattcgtggatgccggcgactgcattgacaatccggtctgccccgacctcacgcggattatcatatttaatgtcgagccctgttttaacccccgggccgacgatcagcggcgaaacgtggaaatatttgctgcacatccgctccagtgcgtacatgatcgggggcaccacagaagaaataataatgccggtaatatctttaaagtgaatgccgacatggcggaacaaggctttcatggacatgccgtattcgtcttctgttttatcccttactgtttgaatgcgccaatggtattttaattcatctttatcgtatacacctaatacaatgtttgtattcccaacatcgatcaccaataacattatgctcaccactttgtttttctgtttagtttttatgcaaccatcataccataatctccgtgatttagagaatgctttcatttggttcccgctgccataaaaaaacaccgcctttttttcagacggtgctttttaaagtggttttacacaatattaaagctggtcatcatctgccggtcttgacggccccagtttccccgggcgcttttcttccggcatcccgttatccgaattatttccggcacctggatccacttcttttatgccgccctgcttcggctgcaggttcacgcgcggctcggtcccgccgatttcagccggatcctgtggcttcgcagacggttctggcaacgtgccgtgttcaaacagatgcttgatttgtttagcatccaatgtttccacttcaagcagcgtttttgcgatcagctccagcttgtcgcggtgttcgagcaagatctgccgtgcccgttcataacaggttttgatgatattttgaatttccgtatcaatttcgtaagcaattttatcggaataattttggtcattgttaatgtctctgcccaaaaatacctggccttgcgaagaaccgaactggagagggccgagcttatcgctcatcccgaattcagttaccatccttctcgcaatgccggttgcgcgttcaaagtcgttggatgcacccgttgacacttcaccgaacgtaatctcctcggatacacgaccgccaagaagccccgtaatcttatcgagcaattccggttttgtcatgaagtaacggtcttccttcggcaccatcatcgcatacccgccggcctgtccgcgcggcacaatggtcactttctggacaatttccgcttcatcgagcacgagcccgataacggtatgcccagattcatggaaggccacaatattgcgttctttttctgaaatgacccggctctttttcgccggtccggcaatgacgcggtctgtcgcttcatcaatgtcctgcatgtcaatttttttcttggaagccctcgccgcaatcaacgctgcttcattgagcaggttttccaaatcggctccggaaaaacccggtgtccgctgggcaatcgcttttaaatcgacggacgggtcaagcggtttattgcgcgcatggacacgcagtacagcttcacgcccgtggacatccggccggtcaaccgtaatctggcggtcaaaacgccccggccgcagaagcgcaggatcaagaatatccgggcggtttgttgccgcaataatgatgatcccttcattggcgctgaatccgtccatttcaacaagcagctggttcaacgtctgttcgcgttcatcatgaccgccgccgagccctgcaccacgctggcgcccgactgcgtcaatttcatcaataaagataatacaaggcgcgttcttcttcgcattttcaaacaaatcacgaacccggcttgcaccgacaccgacaaacatttcgacaaaatctgaaccgctgatggagaagaaaggaacccctgcttcacctgcaactgcccttgccagcaatgttttaccggttcccggaggcccgacaagtagtacgcctttcggtatacgggcacccagttcggaaaacttacgcggatcttttaagaattcgacgacttcgacaagttcctgtttctcttcatccgcgccggcaacatcacggaaacggactttctttttgtcgtcattgtaaagccttgctttgctcttcccgaaattcatgacacggccgcccccgccctgtgcctgattcatcatgaagaagaacagaatgaaaataatcacgaacggaataatggacgttaggaaagaaacccatccattcgtttcttttgcctggaggacatcgactttcactttttgatcgtgcgccgctttatcgatccggttcagcatggactggtcatccatgacatacgtaataaactgtttattgccgtctttcagcaggccccggatctcataaacgccccttgaaggctgcgttgttatactctttacactgccattatccaaataagaaacaaattgatcataggatatcgtttccgtcgtttcgttgctgcggttaaaaaaacttacgatcccgatcaagacgacaaataataatacgtagaaaattgtatttctgaagatccgattcattccttacctcctcccacggtcttaaaaaactatattcaatagtactatagtggtttttaatttaacaatattttgcacccgtttttcatctttttttcacagaccgtctgcttttccatacatatagcctgaatttcacaaggatagtcctctttttccggaattcttattccccctcatgggtataaacagccggcttcaggatgccgatatacggaaggttgcggtatttttccgcataatcaaggccgtatccgacaacgaattcatccgggacaatgaaaccgacgtagtcagcctggatgtccgctttccgtcccgatggtttgtcgagcaatgtgacgattttaatggattttgctttccggtagcggaacaattcaaccaggtaactgagcgtcatcccgctgtcaataatgtcttcaataatcaagacatcgcgcccttccaccgaggtatccaagtcttttaagattttgacttccccggatgaaacagtggaattcccgtagctcgatacgtccataaaatccatttccaaatatgtatcaatatgcttgacaagatcggccataaacatcatggcgccttttaataccccgattgcaagcggaaatctgccatcatactccttcgtcagctgctcccccaattcctttacttttcgctggacttcctcttctgcaattaggattttttcaatatcctgattcatcttgcgattgccccctagaagttgtttgcttacaatagtgcacgacataataggtttcatcaggtaaaataagcccggattcaaattttgcttttttcagattcggaagccacaggatgttcccttttgaatcggttacaaccggccacaaatcccgctccggctttgaaattttctcatcaataaatatatcttttaccttttttgaaccatttagtccttttgcttcaattctgtcccccggtttccttgtacggacaataagggggagagaagtgtcgtttatgtgtaataatagcatattctttggcagggatgaatatgaaattttgctttttacaagctttatcgtatacccgttcggcagatcaatcttcatcccttcatccaagacgtattgatatgcagaacgggcggggcggcgcccgaaagaaaaggccatgcgcccgtaatcccttacagcctttaatccgccggggagatcggcgctcccggacggattggagcctgaagccagttttaaaacggcatctgtatgtatcgctgtgacgtcttttatgtcttcattgtaaagatattttaatattagatgaatcgcccgcctttgtaaaggcataggcatctctttgaacttccggagatcgagcgtgcaagttccgggccctgtttccgccatctgctttaatttctcctgcgccagcccgtaaagataggtttcatcttccaaaagctcttcactgaatctttgaaaatgcaaatgggcccgcgggttttctttttgtagaaaaggcagtacggacgcgcgaaaccggtttcttgcaaaggcgggggatgcgttgctttcatcggtgcgcggctccagatgataatgggcgcagtaatctatgatttcttttttggccgtgcccaacagcgggcggatgatgtcaccctttgcaaacggccggcgaaacggaatgcctgcccttccctttccgcctgcgcccctggtaagccgcataagcaccgtttccatctggtcatcgccatggtggcccagtacaactttattggcgccggttttctccattgcttcagcgagaaaagcgtaccggtattttctcgctgcctcttcaatgccaaggccttcttcctccgctttttccagcaccgggatttctgccgtttcacaaccgatacggcaagattcacagaagcttttgacaaacaaaaggtctttacgggacgcttcccctcttagcatatggttgacatgggcggctgttatctttacacggaagcgctctatccgcgaagtgagaaagtggaggagcgcaagggaatccggcccgccggaaaccgctacgagcaaatggtctcccgcctcaatcagctggtgtttcctgataaaatggaatacgttgtcctcaaatgcgagcataaaacctgtccttttcggtaccgttttgttatttccattgtaacacgggcatttccaaatttctaaacatattccgccttgagaatgggtgccggtgtatttatcctgaacatttatttccacccctttggcgctgatcttgcggcatggacgttttcgtaaaaatttgcgctgtcatttttaaacggccagaaatttgcgatgcttttctttataaaaaggcgcctgtctcaataaaacatgtgatggccatccttgcccgtacccgcatgttgccgctgcgcgcatcttttcgcccatgctgaaatcccggacaaggagccgccgcatgaaccggcataaatttgtggatatttaaaaagggatgctggtttgtccgtaagtataataccagtataacatagagatcatcaagatgatcatcatggcagccacgaaccttttaaattttcggaatctgcgcctttttgaacgagactgtccgggtttttgtttttccggcctgtgcgttgttttggctttcttcttttctccgtccgcagtcagcagattaagcatgtcctgcctcatttcaaaagctgtctggtatccaccccccagcgctttccgcagcaccgcctcaaatttgcacagcccggcatgttgcctgaccgccgccatcagctgcgggaagccatttgcctgtttttttaaaaaccggttcggataagcgagattgatcatcaccattgcggcggaaaacaaatcataggagggctcggctttccgcgatcccaacccccagtaacccctgtcaaaaaactccgtaaattcttttacagaacgcccgatctttgtcatcccgcccgggtcaatgcagcggatcctgtttccaggcgtcccgaccagcaagttttcgggcttcaaatccccgaaaatccatccctgttcatgcaaatgctgcaaatcggaaagaagctggatcacaagcactgccgcccaggaaaaacctttcccggaaacaaaggaaagcaggtccgggccttctatatattccatgacataaaagggaatgacctcccgcccgcgttcccagtcatccgcttccaaaaaggaaggcccgagggactgcccccgggccttggatatggtttttagtacgctggactcggaggccacctgggcagtgctcacaccggcttttaatgcaaccagaccggccgccgattccgccagatatacagcgccatttgcaccggccccaaggcgctttagcaatctgtaccggtttttatgccatttccccgtcacaaccgtacccggcggatcattaaatggattcttcaaagtattgtccgtcatcatgcgtatgatatcccctcagcttccttttccggtcaaaatggcggatcgcctcatgaatggccggccctgtcggcgtaatcccgcctgtctgcagtttcggaaatattgccgccagcgattccagtttcggtgtccagtcaagcagtttctccgtctctttccttttcccaggaaatataaaaactgaaaattggttatttcccatccgcgcattcaggcttaaagacaaatcaagcaaagcttcttttaccgtctcaagcttcggtttcatgcttgcgcttgtatcgacgagcacaagaatgtccaaatccactgtttcccccagctcatccaccacctccaacacatcgccgcgtttttcaggcggcagtgcttcaatggatccgttacttcccaaaatgtgttttaattccttgttcacgattccctgaatcgtctgggtcatcgctttccgtgtgaccatttgcacagtttgcgataattgtttcgtatatacgatctggctgacgccgccccctgacatggcgatattttgaatttccgctgcccctttttcatcaatgatatcccgttccatgacgccaattacattaatggttatgcctgcttcccttgccagtgccgcagctgcagccggatcacccccttggtttgaacatccgtccgtaatcagcaaaatttgttttaaagtgcctgcattcatcttttctcctccttgtcattgacggcatttcttgcgtttttaccatcatcgacaatcgggagaaaatatataccgttgccttccgcttcttctatttaattcccgcttttcagacgtatcttcgcttgtaaagtgcccgcctgaaattcgggcgctttatcaagcaaacgttccaatcctaacgaaattcccttatccggccgcccgcctccttttctatcctgaaaaatggtgcccgttgatgttcattccttttctcctgttgccgcgttcattgcggcacaggcttctgtcctgaaaatgtgcggcagctgatgttcacccttttgcccgccctgcacgctttagcataggtgccccgcctgaatattcaattttatcctttccgtaccgcatttttagctgatcgtggacacgtgcgctgtttctgcttgcagccgccgttttggcccggccgtttcagcacgtatcgcattcagtgtggcacggcatctaagagatcattttttttcctttgctgaccgggatagccgcccatttcggcgtattgtgtttgatttttgcaacgacgaccgtcatatcatcttcaattaaaccggatcgcgaacggatcacttcttctatgagcaggtcggcaatttcctggggattttccgtttccagctcccggattttccgcttaatccataattccgggttttcaatgtaacgcgggccttccaaaatcccgtcactcatcatgattaaaatatcgccggctttcagctgccgggaaacgacatccacatcaaattcctggatcatgcccatcggcaaattcccggattcaattttgatcactttatcgccgcgtttgataaaactcggcgtcgatccgatttttaaaaatttgctgcttgcatcctgcaggtcgatcatcgccagatcaagcgtggaaaatacttcttcctgcgtcctcagcgccagaatggagttcaccgatttgatcgcaattttttcttctatgcccgattccaaaatctgccgcaaaagcctcagtgtctcattgctttcgtgatgggcgcgctcgccgtttcccatgccgtcactgatggcaatggcatactttcttgagccaagctcgatcattgaataactgtcaccggatataaaaccgcctccttttgcggcatgcgccacaccagtgtcgacgacaaacgcccttgccgaacggaatgtcacatagccaagcccgcccgactgcgaaccgaactcttctttctggacaacaattgtttcccctaatatatcggaaagcattggcgcgatgatcttttcgcattcgccatagccactgtactgcggcaaggttatatcaatgtcaatattgcccgactccaggctgtaaatttccacctggtcaatatcgagcccgaagtcctgtaatgactcaagaatcatttcttcctgccgctgatggttctcgcgctcccgctgaatttcctttgcaaaatcccccatgacttccgaaacgccctgcagctgttctgcgacgattttccggctttctttgatcatttttttgaacttttgattggcctggtaaaacgtcaattcctggttgatcgcctcttccactttttgggccctgacacaatgtttctccaattcgcgatggacacgcctcgaaaccgctccgtccctttcactcaggtcctccatcgtcattttcatcaaatcatatgtcttatcaaagtttttcgcccagcactgctcttttttgaagcaggtctggcatgtccgttccgtgacattgctgaaaaaataatccagatcccgttcgcggtcctcctcttctttcgtatggtcatactgcgaaaagcttttggacagcgcctgaaaaacggacgagaactgctccacgcggtgaaccgtcacatcgcgcactttccttaaatattgctgctgctccttcatatattcggctgtccccgggatatgccgcgccattttggccgtaaacggggacggcgttaaaaagaaaagggcaatgctcacgcatgtttcatacagcgcagcgcttaaagacgccccggcatcgccgtacatcgtaatcagcagggtagcaacaagcatcccggcagcagcacccccacgcttcccttcttttaacaatccgcacaggagccctgcgaacgcaagcaggctcatttgataaaagctggacacgttggcgaggctgaaaatgaggccggtcacaaccccgacagtggaaccgaccgtcgcaccgccgacaaacgcaaacagcaggacaagatagcgcgaaaaaatatgctcgacggacagcccgttcaccgtccagccgattgtcccggtcaaaacggacgcgagcacaatgatgaggctgacgacttcctccgtctttaatgttttttttcgccttgtttgtgataagattggaatgctttgcataaatatcatggtaaggataaaggttaagcacgattccacacccgccatcaggccgtcataaaaagagagctggaactgctgctgaagataaagataagcgcattttgaaacgagcgagacagcaaagatgtaaaagggcagcacccgtgtttcctctttatggtatttgccgaacaacctgaatacaagaataaagaggatggtcgaagccagcgtgtacatcccgttcgcaacggataatgttaatccgcccgcagtgaggccgagcagcgtgatgggcgccttatcccgtttcatcacatagacagctgcgaaaaagggcaatgcaaacggcgtaaaatgggacaaaataagggcccttcccagcaaaaagccgatgatcaaaaggctgatgcctttttggataaacaacgattcaaatttcccccggagctgcttccaccctttcgcaaactctttttttgtttcctcaagatccacatggcccccctgctcgatcattccccgctcaactttccccaaattcatcataaactccccctcatcactttgatacaagcaattataaaaggacaagttttaaaagtttgtcaaaattccaatgcaacaccaaagaaaagttcgactttttccacaaatatgcgatgcattttacaattttttttaaaaagagaagttgacaaatgggtgcagtgccgttattatagaaaatgtgctttttcatttaagccatggcggcgtagctcagctggctagagcgtacggttcatacccgtgaggtcgggggttcgatcccctccgccgctatattcgttttgaaaaaaccggcccgttaaaggccggtttttttcgtgtgattcggcgatttttgtccgaaacagtaaaaagaaaaagcggatccgacaaacatttctgtttgaaccggttccgccctccaatgaaaagcaatgatacggatatatgagtcaactagacagcaagttagcctcttctcgcgccgcggccgccgcgtttcgattctgtatttcgtttgagcgaagacaggcgatcttcactgtctttcaaaaagcgcgccattttggattcaaaatcttcttttccgcggttatttccccggccatgcctttgcggccgatgggactgggattgggattgggattgctgcgcctggtctttcgccttgcggatcgacaaaccgattttcccgtctttttcgacattcagcacctttacttcaacgatatcgccgacttttaaatggtcatgaatatcttttacatagttatcagcaacttcactgatatgaaccagcccggttgagccgtccggcaattcgacgaaagccccgaaatgcgtgatgcctgttactttaccttgtaacttgctgcctgcttcaattgacataaaaaaatttttcctccttaaaagataaaaaatcaacctttaacatattataacgaacatgaaaaaagagtgtcaataagacacgtcttcttcttgggcattctttttggaatcaggcagattaaagatgatctccccttttttggaaaggaaatattcgctgcgggcgagttttgcaatatagttatcatctttcagtttcttaatctcgcttctaagcatcgcctgctgcttgtcaatgtcccttacctggtgctccagctttgctttttgttctttttttgcagcgagctgtgcgttccgtgagactagggtagagacgagcagtgcggaaacaagcactgccataacaccgaaaagcgccaatcgccggaaaagcagcttgcgccttcttgccagtactttttctttgaccgattgctgtttcgtataagcattgtccattgaagcaatattgcgtcccaacatactccctcctaaaaagccctaggcagagcggaaagtacagccaccgggcttatcttttaaaaaacctgccgatccggtttttcagtttgataaacttattctggattgttttccaaaatcctgccgttttcataaaaaaacggtcaaaagaggcgcgcagcggattgatgcgccataaaaaaacacccagtgcggaaaacggtttaagcccggtctttaatatccatattaccatttttgccatcatttttacaatcgtataaagcaatcgccctgcgccgagaaaaagggcaaacaaaagaaggacaaatcctttggccgggcggaaaacaagaagccggaacatgccggctgtaaaccggccagtgcggcatgctgcctggatgcaccattccaaaagcttcaagtaaccgtttttgaataatgcctggtaagcggcaaacccgcacaagagagcgataaaaatataaaaccggacttccccggcgtttaccaggaacaggacataaaacagcagcaggctctggaacagccaaaaaaggacatcatggacaaagacaacccagcgctttctgttccgcctttgcaaaaaacggttatacgtatcaagggtgccgccaaaaaagcttcccatcgcgatcatggcaagcatcgtataaaattgcacgctcaggctcatctaaacagcttgctaaagagtcccttagctttctccccgtgatggtcatccaaataaacaagatcaaacactttcccttttatcgagacgacccctttgtcaacatccaggtttttcatttgcaaattctgcccgcggatggcgagaaaacccattaccgtttccagcaaaaactcctcattgtcaaagctttccacctgtttcacgccggtaatatccagcagcttgcggccgcgcatcatcacatcgtgttcctggagaaccggtttgctgccttgcggtgtattataaaagtcactcatcctgatccccactttccttgtccaaactttgtactatactatgcccgtccggacaaaaaaagaccaaaagggaacggcacacgaaacggaagcacggccatgcggaattcgcgcggccctccggaaacgccttcccgcaaagcttccattccgcaactgcatcgggcgtatggcccatctcccgtatatcccggggggcgcgtttctgtcagaaaaataaaaagagcgcccatagccggttcacagcttcgggacaccctgaaacatttttattcgttgacccgcgtttcactgatcatcgtgtacatgccggcggcgtcttctttttttgtcgactcccttaagttctccactttcaccttgaccactttctggccgaaacggatggtcagttcatcccccgttttcacgtttgaactggcttttgcctggacgccgttgatctggattctgccctggtcggcgacttcttttgcaagcgtacgccgtttaatcagccgcgagacttttaaaaatttatcgaggcgcattgtcgtgttttccatgtccatccctcactcccgtttttcctgtttttcggcggcttttatccgctcccagttttgcgcgacttcttccgcgctttcgactttcacattgccaaacacatgcggatggcgccggatcatttttgaagcaagcccttctatcacatcttccatcgtaaacatgccttcctcttcgccaatttgcgcatgcagcaaaacctggagcagcacatcgccaagctcttcaacgaggttttcctcatcttcattgtcaatcgccgaaagcacttccccgcactcttcaaccaaatattttttcagcgaaaaatgggtttgcgcccggttccatggacagccatccggcgcgcgcaaagccgcgatgatttgccgcagttcggcgaagtcccgcaaatcctgctctttaagcggcggaacgtagacgctcgttaaattattgagctcaaatccgcggtccagttcatacagcttcagccatttgacagtttcgtccgtactgccggcagcgcggacgattgccacccggtgttcatccggatatttttccatgagggccagcttgacttcagaagccgccaacgcatcatacacctgcccgactacgagatgctgatccgcctggatgtcgtgcgggtttaaagcagtgccgtctacaagctgaaagccctcaatcggatccgccctgacagaagcgaacagcgcatcgataaaactatgcccgcccgcgattttgatctccgtctgtttcgccgcgctttgttcgaacagcagctgcactgtccgttccgctacaaacgggtggccgggcacggcataaagaatatcctgatgttccgcttcccggaaaaggatccccacaatttcttcgtataccgcttcaaattggtcgtggcgctcgtatacgtcatcaaatgccgtatacttcatcccttcccgttcaagttccggcacggccggatgttcttttgtccgcagaaaaattttcttgtttgctttcagctgcctgtatacaccgagcggaagctggcccatatccccggccccgagaccggcaacggtaatgctatggtttttgttttccaatccgattctttcctttcaggccggctaattttgttccaaaaggcacaagcccccattcttcatccgtcagcaaacgcagccgggcggcacaaaatagaaaaacagccgcaccgattgccgtcccccccaaagcagccagaacgcttgccgccctgccaggaagcccgtaggcaaacaggcggagccaaagctgcaaacaagcggacatggcgaaaagggagagagcgagcttgccgaaaaatagagccggcagcatttgaaaataggctttacccaattttatcatcaatataagcgaaataaaccctaaagcggcaacggtggcagcggaagcgcccatggtcccgaaacgggggacccaaatctcgttcaaaccatatttcaacaggacgcctgccgcaatggccactgcaggagtgtacaccttccccattccctgcaaaatccccgacaatgtcaaaatccaggtgctgaataaaatggaaaccgaaaaaacagacaggacagctgttcccgcgctgttttcaaacagcatcgtattggcaaacggcatgatcccgatcagtccggctgcagcgcccgcgccgaccgccgtgctgatttttaaagcagcctgcacctgtttttcaaggctttttcgcctgcccttcttatattcaagtgcaatcaccgggacaaggttcagggcaaaggaagacgctgccactgtaccaagctgcaaaaacggctgtccgcggtcgtaaatgccttttagtttttttgccgcttccgccccccagccggcgtctgttaacaacgcgtaaagatggagggaatcgacaaattggaacaaaaccaggacgaggccgctgatacagaccgcaatcccgccgcaaaacagggagcgggccgcctgctttacgtctttccattcaaggagccgggctgccttttcctgcctgccgcccttgaccagataaaatacaaggactgctgcagacaccgctccccccaacacggaaccggccacagccccttgccccgctgcataaagcgaaaaaccgccgtggaccagccaaaaggaaagaagaagaatggccgcaacccggaccgcctgttcgagcacctggctgagtgcagtcggcaccatctttccttgcccctgataaacacccctgatcgcagaaatgaccggcatcagcaaaaaggaacaggaaaccgtccggataagcggagaaagacggggatcccccatccacgccgccagtttccctgcggtgaaaaaaacggcaagaaacaatccggaaccgaataagccgagggtgaggaataccgcgtttaaaaatgcgcggtggctgttttcccccgctgcttcccgttccgccaccattttggaaacggcaaccggaaaaccggaagatgagagtgcgatcacaatcccgtaaatcggatacacttgctgataaatataaaaaccgacatcgccgacaatattttggaacggcacgcggtaaactgcactgaggattttcgtaatgacggatgacaaggttaaaatcagaatgccttgaaaaagcttttttgactcatgatcctgctgcacgtcttttctgcctttcacacggccgtaacaccgtacatagaataaaatcgaatgtattataccataaaagggaatacaagacgcgccttacagacaacctgcgaaaaaacagatcaaaaaaacgcagaccctttgcctgcgcttttttggccgtgcgtgaaaacaaatgatgacaaaaaaatcccggaaaaaaacgggagaaaaaagccttactgttccatctggcgggccaggaatccggcagccgtttccgccgatttctgttccacttccccgaacgtgcggtcttttgaaaaaatgacgacagcaccaatcggatcgccgcttgcgacaatcggggcaatcgtataagaagccagttcctcttccaccccgtccaccagcgctgttttccctttttcttttgataaaaccggcatcctgtcctccatgactttttcgatcacttcgccatttcttttatttaagtattctttttttgaaccgccgctgactgcaatcacggcatcccggtcacagatcaggacagggctcgttaaactgtcatacagcgcttcggcatactccttggcaaaatcacttagttcactgatcggcgaatattttttcaaaataacttctccgtcgcggtccacaaaaatttcaagcgggtccccttcacggatacgaagcgtccttcgtatctctttcgggatgacaactctgcctagatcatcaatacgacgaacaataccagttgctttcatctaaagttgcctcactttcatcagatgatttttttccatcctcagatggctcttgaatcctttacctacgttgacattagtatctttcatctggcaagttctatacatcatgaacgttttttgtacaattgctatcgattggattgatttccaattcttctctatctttttcccggaatttttccacggcaaacatcaagaaccataaaaagcacggaacaaaccgctgttccgtgcttttacaaacaggcctttgccaaaaagccgctccttcaggttttagcctccaacttaccgggaagcgctcgtcgtttcggccctttcgaaggcaccccgcagttcccggatcatttccgtgcaggtgtaaagccactcatgtcccttgctttttttaatatccagcgtaattttcagctggttgccttccatgccgaatccggccgaacgcccgtattttctcacaatgtccacgactttcgggccgtttacctgtttcgagcctttttcggacattaaaatcgtaatcaattgcttgttttgtttaatcgatgaaagcatcgcttctttggcgtatactttcatcgccgcaatcgtaaacaggtcgctcacctgctgcggatactcgccgaaacggtcaatcatctcttcttttaattcttcaatatcttcaatcatctcaatgcctctgaaccgtttatacatttcaattttctggtatccgtctttaatataggcatccggaatatacgcatcaatttcgagttcgacttcaaatggcggcagtttttcctctgcgccgtctgtccctttccgtgcttcgatcgcttccttcagcatttgcgaatacaaatcgaaaccgaccgaatcgatgaacccgtgctgttgtgcgcccagcaggttgccggcgccgcggatggacaagtcgcgcatcgcaattttaaagccggatccgagttccgtaaattctttaatcgcctgcagccttttttccgacgcttccgccagcaccttgtcttttctgtacgtaaaataagcatacgctacccggttggaccgcccgacacgcccgcgcagctggtataattgcgacagccccatccggtccgcatcattgacgatcaaggtgttgacattcgggatgtccacgcctgtctcaataatcgtcgtcgtcacaagcacatcatattcgccttcaagaaaaccgagaatgaccgtttcaagctgggattctgtcatccggccgtgggcatacgccacgcgcgcatcgggaacaagccgcgcaatttcctccgccttccgctcaatatcttcaatccggttatacaaaaagtacacctgcccgtcccgcgccagttcgcgttcgatcgcttcccgcaccatctggtcattatattccagcacgtaagtttgcaccgggaaacggttctcaggcggcgtttcaataacagacagatcccgcacgccgaccatggacatatgcagcgtccttgggattggcgttgcggtcagggtcagcacgtcgacattcgtctttaatttcttgattttttccttatggctgacaccgaaccgctgctcctcgtcaatgatcaagaggcccagatcacggaactggatatcttttgaaagcagccggtgcgtgccgatcaccatatcaatcgtcccgttgcgcaagcctttaatcgtttcattctgctctttccgcgtccggaaacggctcaacagcccgacttttatcggatagccatggaacctttccgtgaccgtttcaaaatgctgctgggcaaggatggtggtcggcacaagcatggccacttgcttgccgtccatcactgctttaaaagcggcgcggatggccacttccgttttgccgtagccgacgtccccgcacagcaggcggtccatcggtttctctttttccatgtcccgcttgatttcctggatcgaccggagctggtcttccgtttctttatacggaaaagccgcctcgaactcacgctgcatatccccatccggagaaaaggcaaaccctcttgatgcttccctctccgcatacaatttgacgaggtcgtccgcgatatcctggatggacgactggactttccgtttaacccgtttccattcgctgccgcccagcttgtaaagtttcggctcttttccttccgaaccgacatatttttggacaaggtcgatctggtcaaccggcacatatagcttatccgaaccctggtacttaatatggagatagtctttatggacgccgttgatttcaagcgtcacaatccccaaatatttcccgatcccatggttgacatgaaccacatagtctcctacattcagctcggaatagtttttaatccgctcggcattggacagcttttgccggcgcgtttttttcttcgcctttttattgaaaagttcttcttccgtaatgacggcaagcttgcacatcggaagctcaaaaccggtgttcaggttcccttccgccacctggatatgcccagggatgatacccgccgcgtaggcagcttcaatctcataatcttccagcacactttggattttttcagcccggtttttgtccgcaccaaggaaaaccaccgtaaaacggcctttcttccagcgttcgatttccgccttcagcacatgcatctgcccatggaacgactgcatcggtttgcaagcgatatttacaatgttttgcggatttgtattttggatatggcgcaaaaacagtgacaaatagagcttcttccatttttttcctgacaacagtgtatctaaggcatgggaaacggtcaaatcatagatcatttcaccttcttccaccatcgccgtgtaccattcagcttcttctttatcgaggcgctcctgcatttcctggatccggccgaactcatccaaaaacaaaatgccggaagtttccacatagtctaagagactggcaggctggtcatacagaatcgataaatatttaaaaatttgatcgggtttttccccgtttttcagcttttcgatgtcaaaaccgatgttttgggcaagcagttgtttgacctggtcatctttaattttagccagtgttttgctgagcccttcttttacggctccggccgctttgatgagcaaagggcggcctgccggatattccgtcgccggcccgatggagacagcagaaagtttattccgggaacgctggtcttcagcggaaaacgtccggatggagtctacttcggtgtcaaataattcgatacggaccgggtcttcttctgtcagcgggtatatatcgagaattccgccgcgcacactgaaatctcccggtgaatcgaccatatccgaccgggtataacccatttccacaagcatttccaatacacgatcaagctcaatttcttttcctgtttcgaagtgcagctggtacttttcccaaaccgtcttcggcggcaaaattttccgcattccggccatcgggacaacgatcaggcaattttttcccgatagtaacgcattcagcacatctatccgttgggccatcagttcggggcttgccacgcccagttcggccgcaatcagttcatttgcaggatacagaaataaggcgctttcatccataaattgcaggagatcatcatacaacttttgcgcctgtaatagattataagttaacacaatggccggctgttccgttttttgatagaccgaagcaataaaagcgctgcgggcggaaccggacaacccggaaacaagctgctctttcagaccggccgttatgccgcttatgaccgattctgcttccttgtgttcaaggatcattttttgtattccgtccaaaaagggccaactcctctcttgatccgatttccttttctctactattcacactgttttgtaaaatttaaacgggaaggagctgcagaaagcataaatgttcctgcagcaaaacagaaaaatgctttggactcccttccaaagcggattattggattaaataaccgtattgatgaaatatgggttcgcattcaaatgaatcttggcattcttcgcaaatcgactggatgcggacgctcccgtcttcctggggaagcaccatttccttccgctcctcattcgtcaaaaagaaaagtcccatccggtctgcttcgatacccgggatggtgccgatttttatgccacagtgccggcaatagtaatgaacggccatcttccggccccctttttcatatcgtccttatatagtatgggcgcaatgggaaggggttattcgtttttttatagaaacggaagaaatggccgcggaatttcgcggaaattccccatattccgcataaatggtggctcaattataaaggttcatcacgacagggaacggcttttccagccaagcttcgcaagcatcggcgcttttttcaaccgccagctgcattttcacccggtcctcttttgaaaagcggccgagcacataatccggcatgtagatatctctgtccggccgcccaataccgatgcggatccggttaaactcctgtgttccaagatggtggatgatggatttgattccgttatggccgccggcgcttcctttttgccgcaggcggattttgccgggcggaagatcgaggtcatcgtagacgacaagcaaatctccggtgccaaggcggtaataatccatggctgctttgaccgactcgccggataaattcatatatgtcatcggttttaaaagcagcactttttcgccgtttacagttgtttctgcacacaaccccttgaatttcgactgtttaaaaggggcctgcagccgttctgcaagcagattgaccacttcaaaaccgatgttatgccttgtatgttcatattgggctcccggatttccaagcccgacaatacatttcatattcacaccccgattgattcattccctgctgaaatgaaataagctgctaaggaaaactgcctgcagccgtttttaagggacagcaaggccaggcatcatgttaccgtgatgccttttcagccaacaggcagcccatttgtgcatgcaacgggcaaaaaacagggcacgcccgttttccacccgtgccggtttctctccatacgtaaaaccctgttttaattatccacgaagacagataaaagtgcaagcaggccggactgtgggcatatggcaagtttttcccggaaaatgctgctcctcatgccttccatgccacttgaaaataaaggaacggaacaagtggcgcattttgtgcccccatcatttgcccccggcaagcttgctcgtgcataaaaaacgtaaaatattttatgaaaattcacacacaacgcggcggatacttttctatcttagcaaaggatccggcatgacggcaaaaaaaggcgtatgctcatacgcctttttttcacaaacccggatgttatgctccgcttgtttcccgtccttcaagattttcaggcgtccctgattcctgctgttcgccggtgctgatttcttcttcctggcgaggcggcagaacggagcaaattgtttccgtatcttcatgattgatggtaaatccatactgtccgcggatgtccgcaacagtaatgttttccccaacttgcagattggaaacatccaccgtaatggcatcaggaatttgatccggttttgttgtaatcgacaattcatgcagtgcctgctgcagcacgccgccgtcctttacgccggcgctttcttcagaaaggacaacgcgcacagtggcatcgacatcttccgacatattgacggcaagaaaatcgacatgaatgattttatttttcaaaggatcggtttgcacttcatgtaccatcacattccgctgtgtcccgttcacattcagggaaagcaccgcatttctcccgttttcgcgcagtaatttttcaaactcggcgtaattgacataaactggcgtattttccgtctggtagccgtaaacaacacccggtatgcagccgtttcttcttaactggcggctggaagaatggtgtttatcctgccttttttttgcttcaagtacatctgccataaatattgacctcctaatgtttaagcaaacatcaaatatatctttaccctgccattatccattataaacctgttttgaaaaaatggcttaaaattaccgatataagtgaggcttttcctgatttgcaggatcgcgtgcttttcttgtgaaaacttggactgcttttgaaaaatattttcataccccaatcgccggattctttcatatatcgaacaacgggcttacggactggtcttcatgcacacggataatcgcttcgcccaaaagcggggctacagacaattcaaccagtttttcactttttcgttcttccggaatgttaatggaattggtcgccaccagttctttaatcggggaattgttaatccgttcaatcgccggcccggataaaaccggatgagtgcagctggcgtacacttcttttgcgccgctttcaatcagcgcttttgccgcaagcgtaatcgtgcctgccgtgtcaataatatcatcaataatgatgcaaatttttccgtcaacatttccaacaatattcattacctccgccacattcgggcgcgggcggcgtttgtcgataatggcgatcggcgtttttaaacgttcagccagtttgcgcgcacgggtgacaccgccatggtcaggggaaacgacaacgatatcttccgcttggaatcctttatcttcaaaatactttgcaataattggaacgcccatcaggtggtcgatcggaatgtcaaaaaacccttgaatttgcggggcgtgcagatcaagggtaatgacccttgtcgcaccggccgtttcgagaaggttcgccaccagttttgcggtaatcggttcacgtgcacgcgcttttctgtcctggcgcgcataaccatagtaaggaatcacaagattaatggtccgtgccgatgcccgttttaaagcatcaaccataatcagaagttccatcatatgttcattgacaggatcgcttgtcgactgtatcacataaacatcgcaaccacggatgctttcttcaatattgatctggatttccccgtcgctgaattgtgaaacggaacattttccaagttcgactccgacaacgttggcaatttccttggcaagtttcgggttggagttcagggtgaaaatctttaaattcggatctaaatactggttagacatgatggacctccaattattgttgtttatgttttaacttctggacatagttttccttgttcacctggcgtgcgcgcgcaatggacaatgcttcgcccgggacatcatctgtaatggtcgagcctgctgcaatataagcattttccccgactgtaaccggcgcaatcagattggagttgcacccgacaaacgcgccgtcttctatgaccgttttaaatttatgtttcccgtcataattcactgtaatcgtgccgcagccgatattgacacctgccccgacttccgcatcgcctatgtacgtcaaatgggatgctttgctgcccttgccgactgttgatttctttacttccacaaaattgccgatcttcgcttcatcggaaatcgaggagtccggccggatatgggcaaacgggccgacatggacagaagcgccaatttcactgttttctgcaacggactggctgacttctgttccgtttccgatcacgcaatttgtaatgtcggaattcgggccgattttgcagtcttccccgatgactgttttgccggacagctttgtccccgggtagattaccgtgtcctgcccgatttcaacatccgcttcaatgtaagtttgcgcagggtcgagaatggtcacgccgttacgcatatggcgttcattgatgcgctttctcatgatcctttccgcttccgaaagttgcacccggtcattgacccctaatgtttcttcgatactttctgtcttgtaagccacaaccgtttccccttgcgattttaaaatgcccaccacatcaggaagataatattcgccctgggcattatcgttggaaacgcgcttcaacgcttcaaaaagcgcccggttgtcaaagcagtaaacgcctgtgttgatttcctttacctgctgttcttcagggctggcatctttatgttcgacaattttttccacaaagcctgccgcattgcggatgatccgcccgtatccggcagggtcgggggccgttgctgttaaaatggtcacttttgcctgtttccgttcgtgttcttcaaacagggcctttaaggtttccgcctgaaggagcggcgtatccccgcaaacaaccaaagtggtcccgtccttgttgccgagaaccggttctgcctgcaggacggcatgccctgtgcccagctgttcttcttgcaggacgaatgcggtttttccttccaggcaggagcggacctgttctgcaccatgcccgatcaccgtcacaatcttatccgtttcaagctgtaaaacctggctggcaacatgttcaaccatgggtttcccgcaaacgggatgcagcactttgtacaatttcgacttcatgcgggtaccctggcctgcagccaggattacagcgaatctgtttgtcatttatgatcccccaataaaccttattatccataaaaaaatatatcgtaaataagggcatatttcaaggaaaggcaggatattacaattattgggaatgttggggcatggattggggaggattgccagccctttctatttatctaagtccatctaagtcccatactttgtttgcatgaaagaaataatgctaaccctgaattaaacccccgctttatgcggggggcattttatggggcttttttgtgaaacttcattatccatgaaaatcgcccgtcttctggttgacggttacatatggattttcacccgtatccacttctttcacccaaacttcccaattcccgttgccaatatatttatagcggctgggtgtgacgtggtagcctttatacaattctttctcaaaagtggttacccaggcaaccttttggacggtttacagcctggctggtcttatccgtgccggaactggtgctgttgcttgatgttcctccattatccgatgccggattcccggatgccggtgaatgccttgatgtgggccggcctattttgcattgccagacccggtagctgccgggctgctttcttttgactgtccctcagaatgattccggccgcttcccgttgttgttgaagcggcggattcatcctaactggcgtccttttgttccgctttatctttaggctgcggagaggggcttatttcagaatggtcccggccacttgatacgctttgattttgattgtgttggtatataaagaacccgccaatcacaaccagaacaataaccttacgggcaaaactattttttcatttaaaatgcctcctctcccgcccacacatccgcaaaaattcaatcaataatggtgaaaacaataacagtgcaggctgccaaacggcgccgggaggacaaaaaagaagagccttactgttgaagtaggctcttgttgcaaaaatctatcaggacgcgccagcttcttcaaattccacttgttccaattcccctaaacggtgatattccgacaagactgcatcgtgaatcttattgcgcgtacccgaattaatagggtgggcaatgtccctgaattcgccatccggcgtccttttgctcggcattgcaacaaacaggccattgttgccatcaatcacccggatatcatggatgacaaattcgttgtccatggtaatcgaggcaatcgccctcatcctgccctccgtatggacacggcgcagccttacatccgtcacttccattctttcaccacctcaaaagatttaggatcatctttattattcaacacccctttaaaatttccttctttttcagaaaaaaattctaaaatttttcataaggtgaaaaaatggaagcgtataaagatcacggaataagcgcgaccacttcgatttcgacgccggcatttttcgggagccttgccacttcaacgcaggatcgcgccggtttatggtccgtaaaataggaaccgtaaacgtcgtttatttttgcaaaatcgtccatgttttgaataaaaaccgtcgttttgacaaccgtatcaaaagaagccccggctgcctcaagcaccgcttttaaattttccattacctggcgggcctgcgcttcaatgctgccttccacaagcgtgccgtccgctcttagcggaatctgtcccgaactgaaaaataaatttcctgccacaacgccctgtgcatacggcccgattgccgcaggcgcctgatttgttgagatggttttcattccttaatcccctccgaacaagctaacttttgaaaaataattcccttccaccactttgatctgctggctgcggacatcgacatcccttaatttcacaagggacacgtaatcatcaacaagccgttctttcgtgtcttccgattcaaccaaaacgccgatgcccgaaacagaagcatcgaattctttcagcagattgatcatgccgttaatcgtcccgcctgctttcataaaatcatcgacaattaaaacgtttgcgccttcccgcaggctcctttttgagaggaccatcgtctggatccgtttttgtgatccggaaacatagttaatgctgacagtcggtccttccgtcaccttgctgtcattgcggacaatcacaaccggaacatttaaataagccgctgttgccagcgcaatcgggattccttttgtcgcgaccgtcataatcgtgtcaatctccctgtccgcaaatgcggttgccaaaagcttcccgactttgctgacgacctgcgggctgccgatcaggtccgtcatatacaaataaccgcccggcaaaagccggtccggattctccatcagcgtgcaaagttcgctgatggcctcttttgcttccgccctatctgtacgcgaaataaatttaacgccgcccgctgcgccgggaaccgtctgcaacgtcccaatgccccttttctcgaatgtttctttgataatcgtcaaatcttcactgatggaagattttgcagactggtaacgatcggcaaaaaaactgaggggaacgagaatccttggtttttccaacaaataatgtgtcatatctacaagacgttcacttcgccgaaatttcacgtcaaaaacccccgtcataatcccgtctgtcaaaaatgccggccccgctcttctccgtacaaaatcggcacggcggctctggaaactcggattcaataacattaatataccgcatttttttctttttgaaaacaaaaatccgtacaatcattattttatatttaaaattgttcgcgttctccaatcatcctgacagcaaatacctggccgcagaatccccggaggccgttataaatccgctgcagccgcgaatcatgccggacaagcccgaatactgtcgggccgcttccgctcattaagacgagatccgccccgaagcgctgcatttgttttttgatttgcgccacttgcgggtatgcctttaatgtgacgctttccagcacatttcccgcatgcttgcatatgccggcataatcacgggcgcacagggcgctgatcatgccgggaatatccgggtgcaccacttcatttaagtccagttggcggtaaatttctgccgttgacacgccgatggacggtttcgccaaaatgacccagcagtttggcggtgccggcagttttgtaatattttctccccttccttttgcgagcgcagtgccgccgtatacgcaaaacgagacatccgacccgatttcggcaccgagtgttgcaagctcatctaaggaaaggccgagatcccagagcgtattcaggccgcggagggtagctgccgcatcactgctgccccccgccagcccggcagccaccggaatgactttgtcaatcgcaatttcgaccccctgcctgacgctacaccgcgttttcagaagccttgcagcctggtacgccaaatttctctcatcatccggcacaaaccggttttgcgacacaattttaatctcctgatcgtgccgctccgagagctcgatatgatctgcaaggtcaatggttgtcatgaccatctccacctcatgatagccatcctcccgtttgccaagcacatcgagcgataaattaatttttgccggtgccttgaccaacaacttcaaatccttcacctacttccaacatccaatccagccgtatttcctgcttcatttttcttattctaacataacgcccggcaaatatttacatcaaaacgcaaatttcgtagaacataaaaattgacaaaattgccgcatgtgcattcgccgcccgaatatgcaaaaagccggggaaattccccggcccggcgccatgcagcagtcgcaaagattgtcaggtcagttgcccgattgtttttccgaagcaaggtgcgcttcagccagttcaatggcacgctttaccatattcccggcatcccgggctttaatgccgccccagccttcttcctggacgacatcataaaagccgagatctttcgccagttcttctttaaaacgttcagacatgatccctcttcttcggcccattagataaaatttccccctttgatgggaaaggcaaaaaagcccctgcctttcctttcatttggttgtcatatccctgcatgcgcctctttgtagtatgtacgaaacaagcctggaatatgaagaaagcggcagcagggatccctgctgccgcccgtaaaatagaaaacagcaaacatatgtctgctgccgctcatcaaacctcttgttgtttatccataaaaacaagctgtactgtttctgtcaggacatctgcatagctgtaggaaacacgttcaaaagcattttcctcctggtctaattcgatgacaaaaactgctgggtaagtttctgccaaaacaccggaacgttcaatcgtctttcttctgccgccattggctcttaacattaatctttttcccaagtttgaatccaaggatcttttaatgtctgttaacgtttttggcatttcgctccacctcactagtttcaattataacacagcttgcgcttccggtcaaataaaacgtatattttgcagttctgaagagtaaannnnnnnnnnnnnnnnnnnnnnnnnnnnnnnnnnnnnnnnnnnnnnnnnnnnnnnnnnnnnnnnnnnnnnnnnnnnnnnnnnnnnnnnnnnnnnnnnnnntaaaattttacacatacgtatattttatcagtgatcaagccggtctgtcaaccatttttcattgtttctttgccgtttttccggtcgcaggtttgcatgttcagtgtatggggctgccttggagaaaatgttatacctgtcaaaggctcatattcttatcaataggatatgccaaatgcaatcgaattatgtaaaatcctgcagcccggccaattttgaggaaccgggacggggctcccacttagtcctcatccattggcttatatggcatcccggtccgcagcacgccctttgtttccacgcctcccaggcctttttgccctgtcagtgtattgcggagcacgtcccaaacattcacttgttccataaacgaggtgtaacagattttggccacaatgtagaccggatcgagcgcatgaatattcacccggagcggggaactggcaaaattggcgcctgcctggataagcgactcaaaatgagactggcatgcgcctgcaaaaatgacgagctgatccaaattcggcacctttttccttgcttccatcacggttctgacaaaagattttgagtggcggtatgcatttaaatccgctatttttccctttgattttgaataagcatcatggccggtaatcaccagaatattcggccggtattggtcaagcagcgcattgatgcgaaccggcatttctttttcgtaacaatggatgccgtaaaccgtcacgccgattttttcatataaattcaggcatttttttaaataatggggatcgccgtccaagtgcaaaacccttcccggcagctggaaataactcagttcctctttatagccgtgtgtggcctcataatcgcgcttttccttcaacagttcgatatcctgtttaaacagttcgaatgactgttcttccaaagaacgaaactcctgcgtaattttagatctttccgcagggtcgggggtgaccaggtcttcaaacggggcatccgcgatcagccggacatcctccccgtacaaaacagccactttccgcccgttctgctcctgtatatcgatgacccggaataaaatatcacaattgtaagacttccttccaacaattgcgttgagccttgcttccattgccgtcaactccatttggtttccatctctcgcctgcataacactatatatgcactgccttcggaaatggtgaaaaagccggggtggaacgcactcccccggcttgatgcggcatttatactgttgtgtgaaaaacgggaaacaaagcattgcttaaggcggcaaattcctcgaggctgagcgtttccccccgcctcgatggttcaatgccaagctgcccgagtacggaaagcagcgtttctttcttgtcttttccgccgggaaggccggcagtcaaattattgatcaaggttttccgccgctgggcaaaggaagcttttgccacctgaaaaaagaacgcttcatcggtaaccccgactttcggtttgtcccttttcacaagcttgaccacggcggaatccacattcggctggggcataaagaccgttttcggcacaatcatcgccacttccgccgtcatataatactggattgcaatggaaagcgtgccgtagtttttcgtgccgggaaccgccgaaatccggtcggccacttctttttgcagcatcacgaccatgccgcggatcggatactgtccggtgacaaatttcaatatgatcggggtcgtcacgtaatacggcagattggcgacaaccatgatatcgtttataccagcaaattccgtttccagcactttttcaatatcggcctttaacacgtcttcatagatcacgtttatattcgggtacggcgccagcgtatcttcaaggatcggagccagccttttgtcaatttcaaaagcaacgacttttttgctgctgcgggcgagatgttccgtgagcgcgccgatgccggggccgacttcgacaacgccgctttcttgcgttaaatccgccgtatccgtaatattccggagtatgttcgggtcaattaaaaaattttggcccaggctttttttaaacgaaaatccgtagcggtttaaaatcgcttttgtccggatgggggtggcaatgtctttttgcaagttgattcctcctgtaacactttcatcagggcgtcccggaacgtgtctttatcgatttggaacaccatcagccgtttatggagctgcttgccgttcgtgtatccgatttttaaaagttccccaattcttgcccttctttgtttggccagcggtccggcaatcaggcctgcagccattaaatcatcccttgtgatgacttccggcacggcttcctccatttgatgcgcctcccgcagcgcttgccggatcgccgcaggacgtgcatgttcgaccccgattccccggtcctcgggcgcccgtgcctcctgtttgtccaaaaatgcgtgtttgcagccgggcaccttttccgcgatcgttttgcggattttttcaccgggaaaatcaggatcggtgaaaatgatggcgccccttttttcctgggcaaggcggattttttcaatcgtactttccgaaatggccgacccgtttgtttcaatcgtgtcggcatcgagcgcccgcttgatggccgctgtgtcgtctttgccttccacgacaataacctcttttaattttgccatgcggataaaactcgctttctatgcatgatcttttattttaaacaatttttctgcatttaacatcgtctgctcggcaactttttcaaaaggaatgcctttgatttccgcaatctgctcagcgaccagttttacatatgccggctcattgcgtttcccgcggtacggatgcggggcaagataagggcagtctgtttcaatcaaaagcttttcaagtggaacctcggcagccacttctttcggtttttttgcatttttaaacgtcaccgggccgccaagtgaaatgtagaaattcattttgatgcattccttcgccgtttccgggctgccgctgaaacaatgcataataccgcctgtttcctgtgcattttcctcttttagaatttgcacacagtcttctgtcgcttcccggttatgaataataatgggcaatgccagctttttggccagccggatttgctgcctgaacacttcctgctgcaccgctttcggcgatttatcccaatggtaatccagcccgatttcaccgatcgccaccactttcggatgatgggcaagagattcaatccagtccaggtcttcatctttcatgtcaatcgcatcaaccgggtgccagccgatcgctgcatacagaaacgggtattggtcaatcagcgccatcgctttttggatggtcggcctgtcaaacccgacgactatcatcttttccaccccggccgcccgcgcacgtgcgatggtggcttccaaatcctctttgaacgcttcatcattgatatgcacatgggtatcaaataacatctttttcacctcaaattcttcacgtttgttttcacatatgatcgggaaaaacatctatttttcctgaaaagtaaaagaaaaacatagagagatccgtcgaaatttgttccacgtgaaacatctctatgtttttcatctcatctggtccctttatttgacaatcgcgccgagcggcaggctttcatcaatggttgccaatgacaatatgccgtctttttcgcctgcgagaatcatgccttgtgaccattcaccgcgcaatttgacaggtttcagattggccacgacaatgactctgcgcccgaccagttcttccggtttgtaatattccgcaatgccggaaacaacctggcgctgttcatttccaaggtcaagctgcagtttcaacagtttgtcggctttttttaccggctcacaagcggttacttttgcgacacgtaattccacttttgcgaaatcatcgatcgtgatcccggattttgtgtcttccgctttcgctttttcttctttcgtttcttcttttttcggaaccgcaccttgcatttgcgatttgataaactgaatttctttttccatatcgagacgcgggaaaatcggcttgccttttttcacaacctttgtgccttccggaatgctgccgaataaggacaggctttcccatgtatgcaagctctcatccgtaatgttcagctggtcaaacattttctttggcgttgatgtcaaaaacggctgtaaaaggatggcgatatggcgcagcgactccgccaaatggaccatcacttcggcaagatccgcccgtttggtttcatcttttgccaatgtccacggagttgtttcatcaatatatttgtttgtacggctgacaaattcccataaagaagcgagcgcaatcgagaactgcatgttttccatcgcatcttcgtattttttcacagcctctttatatgcggtcacaagctggatggaatacggattgtgcgaaccggcaaacgttggaatgacaccgtcaaaatactggttcatcatcgcaatcgtacggttcagcagattgcccagatcattggcgaggtcaaaattgatccgttccacaaacccttccggcgtaaaaatgccatccgccccaaacggcacttcacgcagcaagtaatagcggagtgcgtcgagcccgtaccggtcaatcaaagtaaccgggtcaatgacatttccttttgatttcgacattttcccgtctttcatgagcagccagccgtgtgcaaacacttttttcggcagcgggaggccgagcgccatcaacataatcggccagtaaatcgtatggaagcggacgatttccttaccgacaagatggacgtcagccggccagtatttccggtagttcgaatcgtcatcgctgccgtaaccgagcgctgtaatatagttggtcaaggcatcaatccagacatagatgacatgtttcgggtccccgggcacttttatcccccagtcaaacgttgtccgcgatacggcaagatcctcaagccccggtttgataaagttattgatcatttcatttttccggctttccggctgaatgaaatctggattttcctcatagtactgcaaaagccggccgacatatttccccattttgaaaaagtacgattcctcttttactttttctaccggcctgccgcagtccgggcatttgccgtccacaagctggcgttccgtgaagaaggattcacaaggcgtacagtaccagccctcatactctcccaaataaatatcgccctggtcgagcagcttcttgaaaatcttttccactgcctttttgtgacggtcctgtgtcgtgcggataaaatcatcattggatatttcgagttttttccatagatcctggatgccggcgacaatttcgtcgacatattgctgcggtgtcacgcctttttcctttgccttgcgctggattttctggccgtgctcatccgtgccggtcaggaacatgacgtcaaacccgcgcagccttttataacgggccatcgcatcgcctgcaacggttgtataggcatggccgatatgtaaatttccgctcggataatagatcggcgttgtgatataaaaagttttccgtttttcttccaaaccagcctccacctttcgataacattagacatttcttttgcacatttcacgcgctgcttagaacttctaaacaataagtataaaacttttcgtgaaaataagcaaaaaacgtggatttttaaaaaaagtcccttatgtttagtataccgcatcaaggagatgacttgcatcttcatggcgcccggtgcagcgcattatccattatagacggcataccgccggcttaaccggtgcagggccatggtttttatccttgtcgaaaaatattttaaacaaatttgtttttttattccaatttatcttctataatacaattagataggttgtacaggttttgaagattcaggggtattcgccagtttttgatagatatagacgtacagcatttgcgcaatcgggtttggtatcagggttctgtacaggttcacatctactttaagggaggaaagcgttaatgaaatcaacaggcattgtacggaaagtcgatgaactcggccgtgttgtcatcccaattgaattgcggagaaatcttggcattgctgaaaaagatgcattggagatttatgtcgatgatgacaagatcattttgaaaaagtacaagcccaatatgacctgcctcgtcaccggggaagtctcggatgacaatctccggctggcaggcggaaaaattgttttaagccgtgaaggcgcagaattgctgatgaaagaaatccaagaaaatttccatttggaagatcagccggctgaaaatgaacaggcagcggacgaagcagaaccattcgcatccaaacctgagccggaaccggaaccccgctgaaacgcggggtttttttacgccttggacagatcgttgttgccaaacatcctccccggtttttgattcacagttcgtgatagatttggtagacttccctttttggcagtttccggtcttttgccgcaagcttgatcgcttcttttgttggcagctgtttttgctgcatataggcttccacatgttctttgacggatagcgccgtccaccagaaattgccgtcttcttcccctgtttccgggcttccttccacaaccaggcagaactcgccgcgcacttcattgttttcggcccattccaccgcttccctgatcgtcccccgcaaaaattcctcaaattttttcgtcagctcgcggctgatggaaattttccggtcccccagcacttccgccatcatctgcagcgtatgtttcagccggtgcggcgcttcatacaaaatgaaggtggaagggatttttgcgagccgttccagtgccgcccgcttttcctgcttttcccgcggcagaaacccgtaaaacgtaaacggctgcggtgcaatcccggcagcaattaacgccgtaagcgccgcgtttgcgcccggaagcggcacaaccgggatcccttcgcgaatgcaggcagcggcaagctcataacccgggtccgaaatgcacggcatgcctgcatcgcttacaagggcaatcttttcgccgcgcgcgagcctcgtgattaaatcgcgtgcgctcgcttctttattatgttcatgatggcttacaagcggcgtgtggatatcaaagtagctgcacaattttttgctgtttctcgtatcttcagcagcaatcaagtcagcttcttttaaaatgcgcactgcccggaatgtcatatcctcgagattgccgatcggggtcgggaccaaatagagaatccctttatttttttcatcatggaaactttgctgcctgtgcaaggtcgacacctgccttctccaaaaatcgctctttttcccggcgcgggagttttttaaaagcatattccgctttcatggccccgctttttgtctcatattcctgaaaatacaaaagcttaaccggtgtccgcgttcgcgtatacttggcgccccggccttcgctgtgttcgcggaagcgccgtttcaaatcaacggtatacccgccgtaaaaactgccgtcacagcatagaagcacgtaaaaataagatttagtttttgtttccatacagcagttctttcacttcttccgtatattcgccatcctgcccgtacacgaacaagggcgggagaatcttcaaatccggttttccgtcttttatgccttcaaccagaatcgtattcgcttctttgcctgctttcggataaacaaaccggagccgtttcggttcgaggcggtgttttttcatcaacgtaaccaagtcgaccagacgtcccgggcggtgcacaaacgctgctttgccgccctgcttgagcatccggctgctgacttttacgacatcttccaatgtgcagaaaatttcatggcgggcaatcgcaaaatgctcattttcattttgaaaattcttcgtctgcgaaggaaaataaggcgggttgcacgtcaccacgtcaaatttgctgcagccgagcacatccggcatttccttcaaatcgccgtgaatgatccggatcctgtcctcaagcccgttataagcgacgcttctttttgccatatcccagaggcgttcctggatttcgaccccggtaatctccgctttcgtacggctgcttaataaaagcgggatcaccccgtttcccgtgcataaatcaagcactttccctttttggatcggcagccaggcaaactttgccagaagcaccgcatccaatgaaaaagcaaacacggacgggctttgcacaatccttaaattttccgcaagcaaataatccaatcgttcgtctcctgataatgtcaccatcatcctgtagcctccaaaaacaacggctgcataaaacagccttcccggtaaaaggaaggcttttcatcttggaccgttcgttacttcttattcaaaaaggaaaggcagaacaggcaatcttccccgttgcgcgggctgccgaaatggacattgcaaatatggaagccttcctgataaaggcgggccagattgtcatacccttcgccgatatcaagaagcgtctgcggcacgcccttttccttgattttccgaacaatctcggccggttcatcatgcggatctgtgccttccccgccggattcaggctgcaactggcgtctgaaatagtcattctggattttcagaatgctgttttcttcaatgacttccgttaaatcccgtttcagttcccccaacttttcctggagcgccccgatctgcacttccatttgctgtatctcctcaaataattctttcctatccatcagttctccacctcattaatccgtggattgaattgacacaacatccgcacttagaaattcttccatcgtatactcaatcgtacgcccctggctttgtaattcaatttgcaaaactctttccaaaatgttcaagccggttacttttccagttccgtaaggcgtttttaccatttccccgacatccggaaacgcttcttttaccgcttcatattcatcattttcatatttcaggcagcacatcagccgtccgcaaagcccggaaatttttgccggatttaatgacaaattctggtcttttgccattttgatcgataccggctcaaaatcgcccaaaaacgtggagcagcacagcatcctgccgcaagggccgatgccgccaagcattttcgcttcatcccgcaccccgatctggcggagttcgatccttgtccggaaaatggacgccaaatcttttacgagctcccggaaatcgacgcgcccgtcagcggtaaaataaaaaataatcttattccggtcaaatgtatactccacatccaccagcttcatctcaagctggtgttccgcaatttttttcatgcaaatcccatatgcttcttttgcggccgctttattttcatccactgtcatatgatctttctggtcggcaatccggatgatttttttcagcggcagcacgacatcatgttccccgacaaccttgggatttgtcacaacaaagccatactcaatgccgcgcgcggtttcgacgatgacggcatcattttttttaacgggaaaatcgcctgggtcgaaataatatactttgccggcttttttaaaccggattcctactacattaaacaaaggccgttcccccctgcaaatttaaaacaagctgttccatgagcagctgttgattgacattggcacccaatttcttttttgcatcaagaatggctgccagtttttcagccagagaacgcggggagcaggaaagaagatctgcagaaaaaaggtttagctgatcgggataaacgacatcttcctgttttcccagatggatggaaagaagatctttataaatccatatcaacagatccaacccgagatccagttgatttttttctttaaaatgcccaaaccacgcttcctgcaaaaaaaccattgcgcgggaaggcgattttgaaagggttgtatacaattttaacacgatttttcgggcttgtgcaaaccactcatcattgcttaattcaagcgcttcttccaagtggcttgtcatatgggaaagaagcggggccaaattggggctgaccccgccctcaatcagctgttgtttcagtatggcgggcgggaccggcttaaatgaaacgacctggcagcgtgataaaatggtcggcaggatccggtgcagctgggttgtcatgagcacggccgtcgtgccggggttcggctcttccaaaaacttcagcaggctgttggcggcgcctgtcgacattttttcggcgtccgcaatcatatacagctttcgtttcgactccaccgcccgtttggaaaactcctgctgcaacgctttaatctgctctttcttgattgaaaggccgtccggttcaaccagatgaacgtcaggatgtgtgccgtggctgattcttaagcaattcgaacagctttcgcatggaaaaaaatcatccgccggctgcaggcaaaacaatgttttcgccagtagctgcgcggccccttttttccctgtgccgcgtccaccttcaaataaataagcatgtgccatccggctgcgcctgatgctgtttttcagcaaagttgccgcaacaggctggatattttcaaattcttcccatgtcatggcttcttccactctcttaagtatataaattaatcagcaaaccttttacctcgccgatttttcccagtatatcgagtgcgggctgctcttttctgagacaggcgtcggtaagatccgccagttttttgtctattgtttccactatattcaatttgcggctttccccgaaccggtcgaagctttgtgactgtttatttttcatcccgtattcgacagtttgcttcacaaattgttttacaagcgacttgaatttggacaagtctttgagactgcgcgaacgggcaagccggctgcctgcttcgtcaatttgcgacaagagctgttgaaattcatccatttgcagcttttccctgcttgtgtccatcacttcggcaaaatttgttgtgcccgttgccatgctttttgcttcccgggccgttttgtccaaaccaatacgcaaatcctgttgtattttcaatccattattcccccgttaaaactggtgaaattcatctaccggcaggacaaataccgtcgcgccccccacttcgatttcgaccggatacgggatgtagctgtcggcatttccgcccatcggtgaaaccggggtaataaactgttccctcgatttgcaattttccttaatgacctgcaacgctttattgacacgaatttcttccgttccgatcagaaaagtcgtattgcccgattttaaaaacccgcctgtcgatgcaagttttgtcacacggaaattatggtcaaccatggctttcatcaaccggttgctgtcctggtcctgtacgactgcgactatcagtttcattttttcccctcctgaatttccaaccgtgtatttatccttcattatatcatcttccatttaccgttatatatgaaattctgcttctgtatgtgaatttccttttatccggggaaatttttcccgtaatgccggcaaatggcgcccagcactttttgcaaagcggtatgatatatatattctacctctttattggcatcaatggcatggattctatccggaaaccgttttaacaatatttggaacccttctcttacctttctatggaagtcgatggcttccaggtcaaggcggtttacttcccggttttgatttttggcaatccggctgaggcctgtctctgcttccacatcaaaatagagcgtcaaatccggcagcagaccgcccgttgcaaactggttgatccggtacacttcctctattccgattcctctcgcatagccctgatacgcgagcgaactgtcaataaaccggtcgcacaggacaatgcgcccctcttccagtgccggcaggaccttctccgcaagatgctggcggcggcttgccgcatatagcaaagcttccgtccgcgcatccatttccgtattttccgggttcaaaataatgtgccggatctgttcggcaattttaatgcccccgggttcccgcgtcaacacaatgggatagccgttttcctttaagtgtgcggcaatcatcccggtaatggtcgttttccccgcgccctcaggcccttctgctgtaataaaaattcctttcatgttctctccctttctatctataaactgccagcctgttttcaaaaaacggggcatccgcatgaaaccccgccccgcaagcacgcagttgttggatttggtaaagatgggcgtctcgaacctgttcacccggcacaagcagcggcacaccgggcggatacggcgtaaccatttttgccgcaatccgcccctttgcttcttcaaatgatacccattccgcctctttttcttccatttcatcataggcaaggtgcaattccgttaacccttgcagggtgtccaaacctgctgtttctcccgatgccggtttttgttccgcccgttccagcctgggttggttcccggcttgtggagatgctccggcaagcgctgcttcgatccgcccggcagcatcctcatacggaaaaggcatgccgttttttaaaagcggcagcacaaagacaacccgttgtaaatccgccatttctgtgtacacaccggctttttcaagcacggattgaagcttgaacccggagaggccggggaatgccgccagcaatttcagcggatcctgcccctttttttcctccagttttaacatcttgccgagccgcgcggaaaattgctccctttgtgacagggtatagcagatatcttcacggctgaaattggcggcataccaccttgcgtaatcgagcgacatcataatgggatacgacgggctgctcgattgcagcgctgataaatagaattttaacctttcaaacggaaaatgcggcgccctgatatgtaaaaaagaccccattgtcatcgccggcagcattttatgggcagactggacggcggcatctgccccctggtggagcgccgtctccggaaacggggagccaacctgaaaatgcgcaccatgggcttcatccaccagcacataagcgccgttttgatgcgcgatttcagccacggcccgcaaatcgcaggtaatgccatagtaagtcggataagtcaaaatacacgctttcacgtcccggtattgcctgaacgcctgtacaaatactttttctgaaaatccggccggcatttggagttcctcatcaatttcaggaaaaacaaaaaccggattggccctggcaagcctgagggcatgcaaaaccgattgatggcagttccggtccacaagcacacgatcccccggccggcacacggaaaggatcatggcgaggttgccaacggtgcttccgtttacgagaaaatagctcttttcactgccgtaataatctgccaacaaatcctgggcttcttgaatggctccttccgcatggtgcaaatcatccagcccggacagttctgttgcatcatattgcaaaaaagacgcgctttcttttaataacggctcgatcaacaagccatttttatgccccggcacgtggaacgaaacgggattggtatgttgatagcggcatagcgcttcaaataacggcattcgattttgatccatatccgtaccccttatcatacggggccgcctgtaaaaattggccccgggtttactttttctattttactataaacgggcaaaagcgggcaggaaacggatagatgaagttttttccgattgtccaggcatcgcttttcatagaacagaatttacacgggcagggcaaaaaaaataaccaagcctgttttagtacgcttggtcttgtatacatttttgattttggactgccttcaactgtcggacaaaataggaataacgcggatctcctgtatcagtacggaccatttcctgttcgcagtcactgcagataaatgatgtataaagatggatgccgctatgttttaatttctcacaaacaatgcacatttccggttcatttctccgggcactccgattcatctgctccaccccctgctcattatatttgccatcattcctgccgactattcacaatcaaaggaattttttcaaatgttgcaacgaaatagattgatgtatggtatcgtatgccggttttccaggtgtgtgtatgtctgaaaagaaccgccccaatgcgaaaagaagccgtttttaacggctttccgaannnnnnnnnnnnnnnnnnnnnnnnnnnnnnnnnnnnnnnnnnnnnnnnnnnnnnnnnnnnnnnnnnnnnnnnnnnnnnnnnnnnnnnnnnnnnnnnnnnnaatttgacgtttcgttttgttcagttttcaaggaacaatcacatcttgtgacgacttttatatcataacatatccggcagcttgtgtcaacaaaaaaagcaaatcaacaagcaaccataaaaagcacaatttctattatactcgttatgcagtaaatcgcaagtgtttttttcggtgtgtgcaatattccctgtccaatgaacaaaatctacccgaaaatatacgccggctggttttcattcttgcgccggtgcagcaatgaatgcggcattggcaatagttgtttatcagaacgataagataataaagcttctattttcctgcaacaaaagtccggtttctgctgcaaacattaccggattaattctgtaataaacaaatcaggccggctttccaaatcaaccatttcattgttgctaaaaatttttacaagcggtttaatgggagcggacggtttaatgtaaagcacttctgcttcctcatggttggataaaaagacctttgatccaatcgttaaatgggcaacaagggggatcaatgcatggatcacagcgatatcgaactccccgaagtggtcctccagcagctcttcaatggcttgaaacgggattttcctctttttataaatatggtcgcacacgatggcatggtatacatccgctacggcaacaattcttgacaggatcgggattctgtccggtttttcgccaaatggatagccgcttttgtcaagacgttcatgatgctgtaaaatcgcaagtttcgtttcggatttcaaaaggggcgagtgctggaccattttcagaccgtataccggatggttcctgatttcttcgtattcttcttttgttaaggaggctgattttctaagcaaatgcgcagggacttttgccatgccagcatccgcgaggcagcccgccaatgcggcctggtaacaggtccccttcccgagctgcagtttttgggcgattgcgccgcttaacagcccgaccgagatggcatggtgatagatatattcctcttttgttgcatattgatgaataatgcggattttcccgggatcctgttcaataaattcaaaaagcggaataaaaaaatcccttactgcgcctacactgactttggaaccggactgccagctttggaacattttcttgtagctgccaactgcagacgtataccgctcccggaatgcttcaggcactgttgccatttcctggttttcttccttcacgccttcttccgcctctttgcggctattgtaacggcccgcatccacttcttctatcccgaactctttcaggacattgatcattttctgcgttaaaagggttcctttcggcataatggggcgggccgttttccccatgacatccttggtcaaaatatagccggggacgagatcgcatacttttatcttcaagcttttctccctccgtcaacaagcaactgtgctgcccatattttatcaaaaaaagaagcattgtgtgcaatgcttcccgagatttcttattcctctccggtttcttccaccagatcagcatgattttcttcttcatctttttccacttttgcgactgtggcaacatattcttcgtcaccaagacggatcagtttgacgcccattgtatttctgccgagcactgaaatatccccgacagccatccggatcagcacgccgcccgctgtaatgagcatgacatcttcttctcccgttaccgtcttcacagcaataagcggaccgttcttgtttgtgatattgcaggttttcaaaccttttccgccccggctctggatgcggtactcgcttccctttgtccgttttccatagccgtttttggtcacaataagcacatcatcgttttcttccagaatctccatgccgaccacttcatcatcgccgcttaaggtaatgccttttacccctgttgccgaccttcccattgaacggacatccgtttcgggaaatctgatcagcatgccgttcttcgtaccgataatgatttctttatggccgtccgtcagttttacggaaatcagctcatcttcttctttcagatgaatggcaatcaggccgttcgtccggatattggcaaattcagttacaggcgtgcgttttgaaatgcctttttttgtggtaaaaaataaaaaccagtcttctacgaaatcttccacacggatcatcgtattgatccattcatccctgtcaatttcaagcaggttgacaatcggaatgccttttgccgttctgccgtattccgggatttcgtatcctttcttcttatagacttttcctttatttgtgaagaaaaggatcgtatcatgtgttgatgtcgttaagagatgttcaacaaaatcgtcttcattcgtgcccatcccctgcacgccgcggccgccgcgtttctgactccggtacgtcgaaatcggcaggcgtttgatatagccgttatgggtcagggtgatggcgatgctttcctgcgggatcaaatcctcgtcctcaatctggtcaacgcttgctgctataatttccgtgcgccgttcatcattaaaccgttctttaatttcgagcagctcttcacggatgatttcaagcactttttcttcatctgccaaaacggctttcagttctgcaatcagttggatcaagccccggtattcttcttcaattttttcgcgttccagcccggtcaaacgttgcagccgcatatcgagaattgcctgtgcctgcttttcggacagggaaaattgctccattaagccggtacgggcaatatccgttgtttgcgaggaacggatcagctggataatcgcatcaatatggtcaagtgcaatgcgcaggccttccaaaatatgggcacgcgcttccgcttttttcagttcaaaagccgttctgcggcggatcacttcttcctgatggtcaaggtaaaacttaagcgcctgttttaaattcagcacttttggctggcctgcaacaagcgccagcaggttgataccgaatgtcgtctgcatggcggtatgcttgtacaaattgttcaaaatcacattcgcatttgcatcacggcggacttcaatcaccatccgcatgccgttgcggtcggactcgtcacgcagatcggtaatgccgtcgatccgcttttcatgcacaagttctgcaatccgttcgatcaatttggctttgttgacctggtaaggcagttcggtcacaatgatggattctttgccgtttgatctttgttcaatttccacccttgcgcgaagtgtgatagagcctcttcccgtttcataagcacggcggatgccgcttcttccgacaattaaaccggccgtagggaaatccggccctgggatatattccatcaattcctggatcgtgatatccgggtctttgcttaaagcaagaatcgcgtcgatgacttcaccgagttgatgcggtggaatgttcgttgccatgccgaccgcaatcccggaagaaccgttcaccaacagattcggaaaacgggaaggcaggacagccggctccttttccgaaccatcatagttgtcctgaaaatcaattgtatctttgttaatatcgcgcagcagttcaagggaaatttttgacatgcgcgcttccgtgtaacgcatggcagcagccgggtcgccgtcaaccgatccgaagttgccgtgcccgtcaaccagcatatagcggtagctgaaatcctgcgccatccgcaccattgtttcatacacggccgaatcgccgtgcgggtgatatttcccgatgacttccccgacgatacgcgccgattttttatacgctttatcaggagtcatcccgagatcgttcatcgcatataaaattctccggtgcacaggctttaatccgtcccgtacatccggaatggcccgggatacgatgacgctcatcgcatagtcaagaaaagatgtgcgcatctcctgggttaagtttacttccacaatattcgattccggtgtgtcagccatttatgcaacctccttttctttaaatgtccaggtttttcacgtaaatggcattttcttcgataaaattccgccgcggttccactttatcacccatcaacatttcaaacgtgccgtccgcttcaatcgcatcatcgaggctcacttgcagcatcgtccggttagcaggttccatcgtcgtctcccaaagctgttccggattcatttcaccgaggcctttataacgctggatggccggcttcggctgggcaggcagcgtattaagcaactcctcaaggccgcggtcgctgtatacatattcaacctttttgccctgctgcactttataaagcggcggctgggcgatataaatatagcctgcatcgattaacgggcgcatataacggtagaaaaacgttaataataacgtgcggatatgggcgccgtcgacatccgcatccgtcatgatcacgactttatgataacgcgccttcgagatgtcaaaatcttccccgacacctgtgccgagcgcggtaataatggtacggatttccgcatttgacaaaattttatccaaacgcgctttctctacgtttaaaattttccctcttaacggcaggatcgcctggaacatccggtcccttccctgcttggcagagccgccggccgagtcaccttcaacaatgtagagctcgctctcagacgggtcgcgtgatgtgcagtctgcaagtttgcccggcaggcttgtcgattcgagcgcgctttttctccgtgtcagttcgcgtgcttttttcgcagccatccttgcccgggcagccatcagccctttttcgacaattttccgcgccacttgaggattttccatcataaacttctcgaacgcctcggaaaataccgcatctgtaatcgttcttgcttctgtatttccaagtttcgttttcgtttgcccttcaaattgtggatccgggtgtttgatggaaacgatcgcagtgagcccttcccggacatcttcgcctgttaaattggcttcattttctttgatcagattgtttttccgggcataatcattgatgacgcgcgttaaagccgttttaaaaccggactcatgtgtgccgccttcgtaggtgtggatattattggcaaaagaatagatattgctggcaaacccgtcattgtattgaagggatacttcaaccgtaatgccgtctttttcgccttccacataaatcggttccttatggagcacttctttcgagcggttcaaatgctccacgtacgatttgatcccgccctcgtaatggtatacttgtttgcgcggatttttttcgcgtttatcctcaatggtaattttgatgcctttatttaaaaaagccaattcccggagccgggttgtaagaatatcatagtcgaattcggtcgtttccgtaaaaatttccgggtccggcttgaagtgggtcgttgtgccggtacggtccgtttcgccaatgatttttaagtcaaaggcaggtttaccgcggcggtatttttggtggtaaatatgcccgtcgcggtggacatagacatcgagctctgtagacagggcgttcacaacagacgcgccgaccccgtgcaggccgccggacaccttatatccgccgccgccaaatttcccgccggcatgcaaaatggtcatgatgacttcaacggcaggcctgcccactttttcctggatgccgaccgggatgccgcgcccgttgtccttcaccgtaatgctgttgtctttttcaataaaaacattgatttcatcgcagaaaccggccagtgcctcgtcaatgctgttgtccacaatttcccagacaagatggtgaaggcctctcgcacttgtcgagccaatatacatccccggacgtttgcgcaccgcttccagcccttcaagaacctggatttgctcggcaccataagactgcttctgtaattgttcttgttccaattataccacctgcactctcttaaattgaacctgcgggattcctgcggatactggagcaccctccggttatcccggcaggctgtacccgccgtttttgcggttagccggaaacagacgtgccaaaaaacacgccttgcataaagccggttcaacctgtaacgggtgttacaagcaagcaccggttgagtaagcaacattctcttatgttaaaccggttttccggtaaaatgttcggttaaaaaccccgccggaaaaagaccgattgcccgtttgaacagaatgcctggggaaaaaggcgataaatagaccgcattttgggtaatcacggctgatttaaaactgccctttgccaaattgaccgtggctttttcgaaagcctgcaaataggcttcgttgattatggagctgttgagcgatctctcgtccataatggcgataatatcatcgcttcggatcatgacatcttccgcgagatggagatacataggcacacctcacctgacaatttgtcctgccttcactgtatacatggatgcttcccgtaaagtttgatgatccaccccatccacgcttgtcgttgtcacaaaagtctgcacccttccctgtatcgcgttcagcagatgggactggcggtagtcatccagctccgataacacgtcatccagcagcaggatcggatattcccggatttccgaataaatcagttcaatttcggccaatttaacagataatgcggctgtccgctgctgcccctgtgatccgaatgtgtgaacatccctgccgtttactgcaaaggctaaatcatcgcggtgcggaccggccatcgtaacgcccctgtcaatttcccgctcccttatttcggcaaatttattttcgtatgattttatcatttttgaccaatcgagctcttctgatacattcacagagggtttatattggatctcaagttgttcaagaccgcgggaaatcgaatgatggatcgggcgggcccattcttcgagcatccgcacaaattcaaaccgccgcatgacaattttagcggcttgttcaattagctgttcggttaaaatatcgagcatcgtccggtctgtctgttttttcatctgcagctgcttcaaatagtggttccgctgctgcaatattttttggaaccggctcatatcatacaggtaaaccggcgaaatttgcccgatctccatatcgataaagcgccgcctgacctgcgggctcccctttacgagattcaagtcttcgggcgcaaacatgaccacattcatattgccgatataccggcttagttttttttgctcaatatgattgtactttgcttttttgccttttttggagatggtcagttcaagggggacagtaccatgcgttttgtgaagtctcccttttattttagcatattctgcgtcccagcggatgagttctttatcatttgacgtccggtgggatttcgccagtgccaaaacataaatggcttccatcaggttggtttttccctgggcgttttccccgaggatcacattgactttgttttcaaacggaatggttaatgtttcatagttgcggtaattgtgaagttccagttcctgcaggtacatatgccaacatcctttatgcggaaaaagcgccggtcaaccgcggataatgtgaaacataccgattccgccaatttcaacccggtccgcctctttcagtttccgccctcttctttgctccggttctccattgacgagcacttcatgttcggttaaaaaccattttgccattccgccgctttgaatgatatccgctaattttaaaaattggccaagtgttatggtctctgttgaaatttttacatttttttccatttgttcactcttttcatgtactcactaacatattattttactaaaaaacaggcagaaatacaaagcataacaaagcattttaagtgcaatccctgaaagaaagcggtttgcccacgaaaaactaaataaatttatggcaagctgatttatctcatggggccttatatcaaaataaagtttttcaattaaagaaagacaaatcgatgaggaagttgttcgattagccataaaggatagtgggatatgaaacgggggattttagtttataaccatgatgagttggaatgggagtttggatagggcaacagtcttattggattgcgcaggaatatctttttgaacctcgagaagtttattcttcatcctaatgaggtatataaagttcgagttaacattcaggattatatacgtttagatgcccctttttagaggggttttcttttctataaaattcgctgaaatatccgaattgatttttgcacattctgaaataaagtgaaaaaataagcacattatttcagatgatatgccgtatcaatgtgaaaagggcaagctgaaatagtgtgctcgtttacactcttaggaaaactaccttttactaagttagttaaaccgagactctgcggattttgttacggaatttctttgggtttgcggttcaaatttccaggagagtcttgggttgcggcagcgtggtccctaattattgaacttcaatttgaagagatttcccaatataatctcaggtgcaaaaattcagaacgatggataatccattcaatgtcgccagaatagccgagtcatttggcaggcagcatttcttttcttgttcatcgcatcttgcttttctaacttatcagatagcacgaaattccccaaaaaaaatggattttaacggtctgaaatccaagcgtaagaaaaactttccttccacattggagtctcttattaatctaacgaatatgatcagcataaggatcgaataaaccagttattaataacaatgaaagaattataaagataatccctatacttaaaaaagtgaaaaaaattcttcgagatctttttcttgttagaaaagaaatgacgaaggttattaatgaaaatagtatcaaaataatccctgctcctatattcattgaacatattccccctcggacttgaaaaaatggaattgtgctattcattatatgtcaccttaaaggatttataaagtggagtatgtgtcaagtatgtgtcaagtttttctcgacaaggtttaaatatcgggtattccaagacactctttttgtacactttcggctaccgtgcttcacttgctcggtgtaattttcggaaaagatgtgatatttccgtataaagatggacaacggggatgttgaggcgcgcgaaattcactcgctttccgcgggcggccggcgagcctcctcgctcgtacctcgctgcggggtctctcctggctcgcttttcccgcaggagtctcgtaaatttcgcgcgcctcaacgatcagtccccactgagccaagcttaaaacgaaagctctaatattctaatattttgcttaaatgtcccattgccgatgaactgcttgaatgcagggcaactgatccgtgctttacgcccactgacgggcgtacaggctgcttgagttatttttttccactcatttgccccttcgagtaaaattttacacatacatgtgtcaaggcattcccgttttcgcccctgtttttccgcatgcagcggagatgaaaaaagcctgtttttcaacaggcaattttcatcagtacgtccttaccggcaaaatcagctgcagcgtcgtatcatcatgcaccggccggatgataaaaggcctcatcgccccggtaaaacggatggtgatttccgttccttccagcgctcttaacgcgtccatcatatatttggaactaaacgagatttttaattcttccccttcaatggatttacagtttaccctgtccgtcactttcccgatttccggcgaattggatgtgatttcaatcgtgcccgggatatccgtaacggatgaaagtttcacgacatttgcgttttgcccctcttttgcgagtaacgatgccctgtcaatggcttgcagaaactcttttgtattcacaacgatttccgtttttccatctgtcgggatcagccgtgatgtatccgggtaatttccttccagcagacgcgagaaaaacaataaatgctttgctttaaataaaacctgattatccgttatgacaattcccaccggttcattcgaatccggcaaaattttattcaactcatttaaacttttccccggaattacaatattatactcggcatctgcggccgtttcgatttccgctgtcctttgcgccaggcggtggctgtctgttgcaatacagttcagcctgctgcctttaatgctccaatttacacctgtcaagatcggtcgggtttccgcggtggaaacggcaaataccgtttgccggatcagattttttaaaatatctgccggaatccggatcactttgtcttccgtaatttgcggcaaatgcgggtactcttccgcatcaagcccgtttaaattaaagttggatttgcctgaacggatgatggtctggaattgattgaccacttctatctccacaatatccattggcagctttttgaccagttccccaaaaatttttgcctgcagcacaatgccgcctgtttgctgaatgacagcaatttcatccccgtcttcttcttttggcacaaatgactcaattgaaatatcggaatcactgcctgtaaacgtgatcccttcttctgaagcggtaattttaatgccggttaaaatcggaatcgtggttttggacgtaatggcttttgacacatcttggacactttcgatcaggcggttccgcaaaatagaaaatttcatggttattcctccatcgtgtgacgcatatacttatacttaatctttttttaaaaaacagtagtactagtaataggggttgtgaacatgtggataacgttgccgctgcaatgaaatacagtctatccacatgtggacagactgttcatacattatccgttgttatgcacaatatgcgctagcccgctttttgaaccgtgggctacccatttttcagcaaattttgcagttcttcaattttcttttgaaattgcgcatccgtttgaatcaaattggcaattttctcatgggcatggatcacggttgtatgatctctcccgccgaactcctccccgattttcggcagcgaaaaatccgtcagttccctggataaatacatggcaatctggcgcggaaatgcaacggatttcgtgcgctttttcgctttaaaatcttccattttcacatggtattcttccccgacaactttttgaatgtcctcgatcgtaatcgtttttggcttggcgcttgggatgatatctttcagtgcttctgcggcaaggtcggcattgatatccttattgatcagcgaagaataggcgacaacacggatcaatgcgccttccagttcacggatgttcgtgtcaatttgattcgcgatgtaaagcatcacttcgttcggaatatccaaaccgtccgctttcgccttttttcgcaaaatggcgatgcgcgtctcaaggtcaggcggtgtgatgtctgtgattaatccccactcaaaccgcgaacgcagcctttcttcaagcgtcgggatttctttcgggggccggtcgcttgaaatgacgatttgcttgctctcctcatgcagcgcattaaatgtatggaaaaattcttcctgcgtggattcttttccggcgagaaactgaatatcatctatcagaaggatatccacattccggtatttgttccggaattcgcctcctttattgtcccggatggaattgatgaattcattcgtgaatttttcagaagacaaatacaccactttggcttttggattatgctctagtacatagtggccgatcgcatgcattaaatgcgtttttccaaggcccaccccgccgtatatgaacaatgggttataggcttttgccggcgcttcggcaacggcaagggaagcagcgtgcgcaaaacggttaccggaaccaatgacaaaggtatcgaatgtatactttggaatcagcatgctctgataatcgcgggtatcattcaatttatccgctgattttttcggggacgggaacagctctggttcatcactgtcctgctgttgcggaataacaaatttaatttcaagctcttctccggttatgtcgtacaagaccgttgtgatgagcggaatataatggccctccagccagtccctggcaaactcattcggcacggaaatgacaaacgtatcgtttttcagcgagtatgccttagtcgacttgagccaggtgtcaaagctgggtttactgatcttcttttctatcacggacaatgctttttcccaaagatcagcgatattttccaacgccaatccctcctttttatcaaacgaaaaataaccattctctctgtctgtgtaacattgtttcggcgaaggttgcggccatttataaacatgcacatgtttgtatggtggaaaaatatataataaggaataaatacggaatttcgacatcatccaccaattgtggacaactttattccaatggtttggataaactgtccacaagttatccacaaactgtggatgaattagttatacacaaccggttattcagggttaaaacacaataatcataacagataatcttaggtgttgcaatgatctttgtaaattagtatgtgtcaagtttttctcgacaaggtttaaatatcgggtattccaagacactctttttgtacactttcggctaccgtgcttcacttgctcggtgtaattttcggaaaagatgtgatatttccgtataaagatggacaacggggatgttgaggcgcgcgaaattcactcgctttccgcgggcggccggcgagcctcctcgctcgtacctcgctgcggggtctctcctggctcgcttttcccgcaggagtctcgtaaatttcgcgcgcctcaacgatcagtcccgactgagccaggcttaaaatgaaagctctaatattttgcttaaatgtcccattgccgatgaactgcttgaatgcagggcaactgatccgtgctttacgcccactgacgggcgtacaggctgcttgagtagttgagacatcctgatggattgtttcaagttccgttgctttctctcgcttcttgaacggtgtttcagataggcttctctcaatgtcccattgnnnnnnnnnnnnnnnnnnnnnnnnnnnnnnnnnnnnnnnnnnnnnnnnnnnnnnnnnnnnnnnnnnnnnnnnnnnnnnnnnnnnnnnnnnnnnnnnnnnntaaaattttacacatactgtaaattatccacaattcgcaaaaggtgtgaaaaatcattatccacatgctctgaatttgtgtgaaacttgtcaataattgttgtggatacttgaaaatccgccgaaaaattatccacattccggctgtgcggaaaaatagcggatgataaccgggagggatcatcccgccccgtttttcgcggaaacaggacgccgttttggaccagaagagcacggaagcggagctggaaaaacggcccgttattttaagcgggaagacgaatgccaggtacgcggagttttggagagccttgacaagcaggaaagttcgtcattataataatatagactgtcgtttatcattcgaacgaattccctcgaggaggtgtcatacatgaaaagaacttatcagccaaataaaagaaaaagaagcaaagtccacggcttccgtgcgcgcatgagcacaaaaaacggccgcaaagtattggcaagacggcgccgcaaaggaagaaaagtattatccgcataaccactgaaaagtctcagtggttttttttaactaaaaaggcggttccggccgccgcttttggctgcatcactgttggcaggacagaaggagtatatatgagaaaatcttatcgggtaaaaaaaaatacagaatttcaggaggttttcaagcacgggaagtcgttcgcaaaccgccagtttgttgtatacgtgctgaaaaagaaaaaccggaaacatttcagaatcgggctttccgtcagcaagaagctggggaatgccgtcaaaagaaatgaaatcaaaagatatatccggcaagtgtttttagagttgaaagaagacatcccgcccggatatgattatattattatcgccagaaaaccggcggccgagatgaattaccatgaagtcaaaaagagcttaatccacgttctgaaaatagccaatgcccttaaaaaaagttagaataaaagaagaaatttaccagggcgtgcggcagcatccggctgctttggaacatctgaaaaagtaagcgttttttgctgaaatctcatacaggggaggacaaacgattgggaaaaaagtttgcgctggctggaatggtacttgcccttgctgccgtgatggctggctgtacggaatttaaccaggatatcacaccggaaagcaaaggaatctggaaccagtatattgtatatcccttatcctggctgattataaaggcagcccggtttctggggggcagctacgggctgtccattattttgattacgattatcatccgcctagccattttgccgctgaatattacccaactaaaaagtgcgaaagccatgcaggcactccagcctgaaataaaaaaactgcaggaaaaatatgcgtcaaaagatgcggtaacacggcaaaaactccagcaggaaatgatgaaactgtatcaggagtaccatattaatcctgctgcaggatgcctgccgattttaatccaaatgccgatattaatcggattttatcatgccatcaaccggacgccggccatccgcgagtcctcttttctttggtttgacctcgggtccgcggattatgtgcttgctgtgattgccggcatcaccacctttctccagcaaaaagtgatgatgtccggggggaattatgatgcaaatccgcaaatgaaaatgcaaatgaacatgatgctttggtttatgcccatcatgattattgtgatcggcgtggggctcccgtccgcgctgccgctgtactggattgtcgggaacatctttatgattgtccagtcgtatttcattaaaagtcctgctgcaagcatgcctgtccaaaacgcaaaagccagggggacgaaaaaatgaaagaaacgaccgcaacagggcaaaatgtagaggatgctgtcaaccaggcccttcaggagcttgaagcggaaaaagaaaatgtggagattgagatccttgatgaaggcaaaaagggcatattcggcctgttcggcgcgaaaccggctgtcgtccgtgtccggctgaaagagacgccggttgaacaagtgctctcctatttgcgcaatattatcgaaaaaatgggggtttcccccggcctccaattcgaagaacatgaccggacattgcatattaacgtgacgggcgaaaacctgccggtgctgatcggaaaaaggggacaaactttaaatgcgttgcagtttcttacgcagctggccgcaaaccggtattatccgcattatgaaagagtgatgcttaatattggcaattaccgggaaaggcgggaagaggcgctaaaccggcttgcggaaaggcttgctgcccaggttttgcgcaccggacggccggtaaagctggagccgatgccatcctatgaaagaaaaatcatccacagtgcgctcgcccatcataaacatgtcataacctattcagaaggaaatgaaccaaaacggtatgttgtcattgatttggcaaagcattaaacgccctccatccgggaaaccgggggaggcgttttttttagctgtacccaccgtggtgcagctttttttgccgcatgaaaaaaagccggcatatccacaacctgggataatcagctttttctgccgttgttattcacatgtggataagttaaaatggagttatcggctttttgtggattgtggaaaagaacatatcacttgtattcgcgaaaaaatttggtattctattacgttaggtgaaaaaaagaaagcagagtgccaatcttttatataaatgaccaaaaaaggaagcggggtgaaaaaatggaaatggatacaattgcggcgatctcgacgccgatgggagagggagcgatttcgattgtccggctgagcggcgaaaatgcgatttcgattgcgaatcgattatttgcaggtgtcggcgggaaaaaactggcggatgtcccttcgcacacgatccattacgggaaaattgtcgacccggacactgccgaaaccattgaggaagcgatggtgagcgtgatgaaagcgccgaaaacgttcacgcgcgaagatgtcgtggaaatcaactgccatggtgggctcgtcgctgtaaaccgggtattgcagctcgttttaaaaaatggtgcgcgccttgctgagccgggtgagtttacaaaacgggcgtttttgaacggacgcattgatctgtcgcaggcggaagctgtcatggatttaatccgcgctaaaacggacaaagcgatgaacgtggcgatcggccagatggaaggcaggttgtcgaaactggtcaaaaggttgcgccaggaaatattggaagtcgtcgcgcatatcgaagtcaatattgattatccggaatacgacgatgttgaagagatgacgcaccgcatgctggaagagaaagcacagtacatcaaaaatgaaatcgaaaaactgttgcggacagcgcaccagggaaaaattttgcgggaagggttgtcaacggctattatcggccgcccgaatgtcggaaaatcatcattattaaacagccttgtccaggaaaataaggccattgtcaccgatattcccggcacgacacgcgatgtgatcgaagaatacgtcaatgtccgcggtgtgccgctgcgcctgattgacaccgcaggcatccgcgaaacagaagatatcgtagaacgaattggtgtggaacgttcgcggaaagcgctcaaggaagcggatttgattttgcttgttatcaactcatccgagccgctcagcccggaagatgaggctttgtttgaagcggtggaaggcatggatgtgattgtcatcttaaataagtgggacctgccgcatcaagtggagatggaaagcgtccgcgaacttgcgcaaggcgcgaaaatccttaccacgtcgcttgtaacggaggaaggcatggagaaattggaagatgcgattgctgcgatgtattttgaagggcagatggaaacaggcgacctgacatatgtatcaaacagccgccatattgcgcttttgaaccaggcactagaagccattcaagatgtgcaaaacggcattcaatccaacaccccgattgatatcatccaaatcgacctgacccggacatgggacctgctcggcgaaatcatcggtgacaccgtccaggaaagcttgttgaaccaactcttctcccaattctgcctcgggaaataagaaaagcggagggcgtttgctcatcggcgtacggattttattaggcctctgactgagattgagtgaaactgcaatcatcagggccacggccctgatgattgcaagttgaaccaatcggacatttacgggcagttgacccccgcttagcctattgtgtcatatttttatcatacctgtggcgggggtcttactgcccgttaatgcgggataaaggaaacacggcgaggaacgagccgatgcccgcttatcgtagggaagaggccggaaaatccgctagccgataacgcccgcagctggacaataagaaaagcggagggcgtttgattttataaaatgaaggagtgataagcatgcggcaatacgatgcaggagactatgatgtcattgtagtcggcgccgggcatgccggttgtgaagcaggcctggccgccgcaagaatcggtgccaaaacgttaatgatcacgattaatctcgatatgattgcctacatgccgtgcaacccgtcgatcggcggtccggcaaaagggatcgtcgtccgcgaaatcgatgcacttggcggtgaaatgggcaggaatatcgataaaacctatatccaaatgcggatgctgaataccggaaaggggccggccgtgcaggcgctcagggcccaagcggataaagtcgaataccaacgtgaaatgaaaaaaactattgaaaaccaggaaaatttgacgcttttgcaaggaatggtcgaggaactcgtgcttgatgacggcatctgcaaaggcgttgttacaaaaaccggcgcaaaatatacagccaaaacggttgtgctgacgaccggcacgttcctgcgcggcgaaattattatcggggaactgaaatattcaagcggcccgaataaccagcagccttccattgccctcgctgaaaaattggaagagctcggctttgacctcgtccggtttaaaaccgggacgccgccgcgcgtaaacggcaaaacgattgactacagcaaaacggaaatccagccgggcgatctggaaccgcgggcattcagttatgaaacggcgaaggtgatcacggaccagctcccttgctggctgacttacaccaatgaacgcacccatgccattattgacgccaatctcggccgcgcgccgatgttttccggcatgatcaaaggcaccgggccgcgttattgcccgtcgattgaagacaaagtcgtccgcttccatgacaagccccgccaccagctcttcctggaaccggaaggccgccacactgaagaagtatatgtacaagggctctcaacaagcatgccggaagaagtgcaaagggaaattttggcctcaattgaagggctggagcatgcaaaaatgatgcgccccggttatgcgattgaatatgatgcgatcacgccgacccagctgtggccgacactcgaaacgaaaaaagtgaagaacctttatacagccggccaaatcaacgggacgtccggttacgaagaagcagccgggcaggggattattgccggtatcaatgcagcgcagagagcactggggaaagaagaacttgtcctccgccgttccgatgcttatatcggtgttttaattgatgacctggtcacaaaaggaacgcgcgaaccgtaccgccttttgacctcccgtgccgaataccgcctgctgctgcgccatgacaatgcagatctcaggctgactgaaattggctataaaatcggcttgatttccgaagaacgttaccggaaatttacggcgaaaaaacaggcgattgaagcggaaatcaagcgtttgaaatccgtcattctgaaaccggatgaaaaaacgcagacactgatccgggaagcgggaggaagcgaactgaaagacggcatccacgccgctgatctcctgaaacggccggaaatgcggtatgaacatatcaaagcgcttgtgccgcctgaaacgggacttccgcctgaagtggaagaacaggtggaaatccagatcaaatatgaaggctatatcgcaaaatcattgcagcaagtggaacggatgaaaaagctggaagacaaaaaaatcccgtctgatattgattataatgcgatccacgggctggcaacggaagcgcgccaaaaattaaacaaagtgcgcccgatctcgattgcccaggcatcgcgcatttccggcgtaaatccggctgatatttcaattttgcttgtctacattgaacaggggaaaattgcaaaaatccctggataaggcatgaatcccgggtttttccggcttctccctttttttacatatcaaccgaaaggatggaaaaatggacagcggacaattcattccattattggctgaaaaaggcatcaccttaagcggggaacaaaagaagcagtttgaaacgtattatgaatggcttgttgactggaacaacaagatgaacttaacggcgattacggaaaaaggggaagtgtatctcaaacatttttatgattcgctgacagccgccttttttaccgattttaacggcccactgcacgtttgtgatgtcggcgccggcgccggctttccgggcatcccgttaaaaatctgttttccggaaatccggctttcgattgtcgattcattgcaaaaaaggattacatttctcgggcatttaacagaagcgctcggtttaaaacaagtttttctatttcacgacagggctgaaacctttgccaaaaaaccggaacaccgcgaacaatacgatgtggtcacggcaagggcggtcgccagaatgtccgtcctctccgaactgtgcctgccgcttgtgaaacccggcggcagatttatcgcgatgaaagcccagcatgccaaagaagagctcgaaaaagcggaaaaagcgatccgtctcctcggcggacaaacggaaaatgtatacaactttaccttgccggttgaagaaagtgaaagaaacctgattgtcgtcaaaaaggtaaaggaaacgccgaaaaaatatccgcgcaaaccgggaaccccggtaaaactcccgcttgaataaggcgggcgttttaccgtgccggaaatcgggatgatgcgctaaaatgagggagattgttcgaaaaatcgccgggagtttggcaggaacttgtcttataatagagaataagtagttagggagaatttataaggtggtgtacagtgaatgaagcatcctttctctcgttttttcggagtggaggaagaaatcggggaagaagaactggaagcagagaatgaaaatgaagagattaaaaatatctccgtctcctgcattatcccgaaccggtttcagccacggaccatttttaatgaagagaaaatagatgaacttgcaagaacgatccacacccatggcatcatccagccaatcgtcgtccgcgaatacgaagcaggccagtatgaaatcattgcgggggaaagaagattccgggctgtccggaaactgggctgggaaaccgtgcctgccatcataaagaatatgagcgatacggaaacagcctcgattgctttaattgagaacctacagcgcgaagaactgacgccgattgaagaagcgatggcttacggaaagcttttggaacttcaccatttgacccaggaagcactggcacagcgccttggcaaaggacaatcaacggttgcaaataaactgcgccttttgaaattgcccccggaagtgcaggaagcccttttgaaaaaacagatcacggaacgccatgcacgggcattgattcctttaaaagaggcggaaaagcaggttcgcgtcctcaatgaaatactcgcaaaaaatttaaatgtgaaacaaacggaagattatgtcacccgtatgatgaataagccggaaaaaaaagcaaagccgcgcagacaagcgttcagcaaagatatgcgcattgccgtcaatacgatccgccagtctgtttccatggtgaccgattccgggatcaatctcgattcaaaagaagaagatttcgaggactactatcaaattacgattcggatcccgaaaaaggcgaaatcccaataaaagaaacttggatgacaggtttctttttttcaggtgcaggccactccctatccaccggctttaaacatctgccgggtttgtgctgcctgccttggctttacaacaaagccctttttcctggtatcccggcggtgctgcgttcttttctgcatgggtgcaaggctttggcattagaagccgcgcctcctggttttcaattgccgaaaaaacttgaaacaaccttttttcggtttacagtaaacgaatcttgcaaactttgatacaataaagttacgtgtttgccgtttctgcaaatgcagacgggccgtgactagcgtgacaaaaaaggtaggtggcaaccgtgggaaaagtgatttctatcgccaatcaaaaaggaggcgtaggaaaaacaaccacttctgtcaacttgggtgcctgcttagcatacatcgggaagaaggttttgcttgtcgataccgacccccagggaaatgcaacaagcggagccggaattgataaaggcgaagttcagcagtgtatttatgatgtgttagtggaagatgcgaatataaaagatgtgatcagggcaacggccgtggacgggctttattccgtgccggcaacgattcaactggcgggagcggagattgaactggttccgaccatttcaagagaagtcaggttaaagcgggcgatcagcgccatcaaagacgattatgattatattatcattgactgccccccctctctcgggctattgacgttaaatgcactgaccgcgtcggatgccgtcattatccccgtccagtgcgaatattacgcgttggaagggttaagccagctgctcagcacggtcaggcttgtccagaagcatttgaaccacaatctaatgattgacggcgtgttgctgacgatgctcgatgcccgtaccaacttggggctccaggtcattgaagaagtgaaaaaatatttcagggacaaagtataccgtaccattatcccccgcaatatccggttaagcgaagcgccgagccacgggcagccgattattctttacgaccccaaatcgcgcggtgcggaagtgtatttagacttagcaaaggaagtggcggcaaatggctaagggacttggaaaaggcattaacgcgttgtttgcgaatatggacgtcgacaaagaagatgccgtgcaggaagtcaatattaaagaattgcgcccgaatccttatcagccgcggaaaaattttgaacccgaagcgcttaatgaattaaaagaatccattctccagcatggcatcctgcagccgcttatcgtgcgcaagagcattaaaggatacgaaatcattgtcggggaacggagatacagagctgcaaaagaagcaaaacttacaacggtgccggttgtcatccgcgatttgaacgaccggcagatgatggaatttgctgtgctcgagaacctgcagcgggaagatttaacgccaattgaagaagccaatgcgtaccagtttttgcttgaaaaattaaatgttacacaggaggagctggcaaaacggctcggaaaaagccggccctatattgccaatcacctccgtattttgtctttgccggtcagcatccaggaagccatgtctaaaggcaaactttcgatggggcacggccgtacgctgcttggcctggaaaagaaagaaaaaatggaagaaatcgctgaaaaggctattgccgatggattaagtgtccgccagctggaaaagcttgtccagcagttgaaccggaatgtttcacgtgaaacgaagaaagacaaacaggaaaaagatatttttatccaggaacacgaaacggttctgcgcgaaaagtttgggacaaccgttcatattaagcggacaaagaaaaaagggaaaattgaaattgaatttatgtccaatgaagatttagaacggatattgcaattgctggatgccggttttgaacaggaaacgtaagaattacaaagatgaagacaaaaacgggtgaaaaagatggtattgctggggacaattgtaaacgggctgagcattgtagccggttcgtttatcggaaggctgttaaaccatattccggagcaaatgaaaggcaccgtaatgcaggcgatcgggcttgcggtgatggtgctggggctcggaatggggctgaaaagtgcacagtatattattgtaatattgagccttgtgattggcgcagtcatcggcgaaatgctgcagcttgaagctcatttgaacgggcttggtgcctggctggaaaaaaagtttggaaacagcagccagggcagtacggccgaagcctttgtcacggcaacgctcgtttttgtgattggcgcgatggccattctcggagcattggatagtggaatcaggggcgaccatacggtgctgtacacgaaatctgttctggacggtttcacagcactgatcttgtcttcaaccctcggtttcggggtggttttttcggttgttccggtgatcctgtatgaaggcgctattgcgttatttgccacgcaaatcaaccggcttgtccccgcaccggtgctgcactcgtttattaccgagatgacggcaaccggcgggattatgatttttgccatcggtttgaatattgcggggcttgccaaaatcagggtggcgaatttattgccgggcatcctggtggttgccgtgctggtcggcctgttgcatgcttaccatacggttttcggatgaattttaaaagaatgaatcaacacctgtttatcggttgaagtatgaatgtgaaccggcagaaacttactgaagttgcggatcctttcactggatcccgggggctatacaggttgccggcttattcattcatttggtttcgttgtcatgatattattgtttagaagtttgcgttcaccgggggatttcggataaacggtttcaaaaatgctgctgtttccggataacttaaatcagcttttccttctcctgtccgctgttcatggaaatcatggcgttttggtattgaagatgcagatgggcgcggctgatgcctgcagcgatcagttttgccattttcagaacaagatttaaacgggtattctgaaggacggtaaactccataaaaccgctgatgttcacaatgcctgtaatatggatgtcgccaacaggaggcaaatctttctttacacccgcccccggtttcaccgggccgtcgccgatttggatcatgccgacgctcttcatttttccaaggcaggcatcgacggcaatgatgaaggggtcgtggtgcttttgataaatcctttcaatattttcttccaggtttaaagcatggaccggcttatccagcgttccgtatacgttgaagcaggccaggcctgtttcttccagaaaagtgcccgttaaaggcccgagcgaatccccggtggaacggtcggtgccgatgcagaccaccaccaattcccggtttatgcttttcggaagtgctgataaaatatggttggatatgatttcttttgccagaacatcatcatgaaataccttgatacgattgccgccgaattccaattgtccttttctcagattcatatcagccactccctctttgtaatagtaccagtatacggaaaatcaaaaaaatctatacattaacatatctcttttttgatacccgcaaccggcagttttacacttgattcagccgccaatcaaaaaggtaatttttgaaaagcggagccggttgtcgagcaagcgcggtttttttgttacaataacgttaaaagaaatgaaggttggtggaatatgggccattttgagacatatctcaaacacctcacatccaagtggttaaatgaaaatacatggatcggagtcggggagacagtgctgaagatgattgtggtgctgcttgtcgcatcactggtcattaaattcggcaaaaaggcgatcggcaaaatttttgcagtccgcgccaaagcccctctccggttttcagagcggcgcgaggccacattgttgcggctgatggtgaacacattgacctatctcgtctggtttgttgccattgtcacgattttgtccattctcggcatcaatgtccaggggcttctggccggtgccggaattgtcgggctggctgtcgggttcggggcacaaagccttgtaaaagacgtgatttccggattctttattatctttgaagaccagttttcggtcggcgatacggtgcagatcgggaaatacgaaggcgttgtggaagaaatcgggctcaggacaacaaaaatcaaaaactggaccggcgaattatacatcattccgaacggcaatatttccgaagtcaccaatttgtccatttataacagcgtcgccgttgtggatgtccgtattccgtacgaagaggatatcgacaaagcggaagcggccattcaggaaatactggtgtcatttgcgggagagcacgaagaagttgtgtcagagcctgaactgttgggcgtccagcagctcggcaccacggatgttacgctcagggtggtggcggagaccctcccgatggcacactggtatattgcgagagtgttgaaaaaagaaattaaaaaagcattggacgaaaatcgcatccatgcaccttatcctaaaatggtgacttattcccgtactgagaaagaagaggcattagccggccaatttctaaagggggatgaacatggaagataaaaatttcgggttgtatgatattgtggaaatgaaaaagcagcatccgtgcggcacaaaccgctggaaaatcatccggatgggggcggatatccgcattaaatgtgaaggatgcggacacagcgtgctgctgccgcgcagggaatttgcccgcaaactgaaaaaaatcctcgtcaagcacgaagaagcatagcccttttatgggtgtctttttttgggagccggggtgcggttaagtaaggccggcaaacgaaaaatgttaaccgggcgcatccagcggcaccctgggggtttttgatacggccgggaaaaacttgaaagatacgagaatgtttgaaggagtggacataaaatggcgttaacagccggaattgtcggtttgccgaatgtcggaaaatcgactttatttaatgcgatcacaaaagctggggccgaatctgcgaactatccgttttgtacgattgacccgaatgtcggcatggtggaagtgccggacgaacggctggaaaaattaacagaactgtaccatccgaaaaaaacggtgccgaccacttttgaatttacggatattgccgggatcgtcaaaggcgcgagcaaaggggaagggctcgggaacaagtttctttcccatatccgccaggtggacgcaatctgccatgtcgtgcgctgttttgaggacgagaacattacacatgtttccgggaaagtcgatccgattgatgatatcgaaacaattaatcttgaattgatcctggccgatcttgaaacggtggacaagcgtatcgggcgtgtggagaaaatagcaaaacagaaggataaagaagccgttgccgaatacgaagtgctggccaaattaaaggcggctttggaagcggaaaaaccggcgcgggcggtggaactgaccgaagaccagcaaaaaatcgtcaaagggttccagcttttaacgagcaagccggttttgtatgtggccaatgtcggtgaagacgacattcaggacccgtccgcaaacccgtatgtcgggaaggtgcgcgaatatgccaagcaagaaggcgcggaagtgattgtcatatgtgcccgcattgaagaagaaattgccgagctggatgacgatgagaaaaaaatgtttttaaccgaactcggcatccgggaatccggtcttgaccagctgattaaagctgcttacagcctgcttggccttgcgactttttttacggctggggaaccggaagtccgcgcgtggacattcaaaaaaggtatgaaagccccgcaatgcgcaggcattatccattccgactttgaaaaagggtttatccgggctgaaacggtgtcgtatgaagatttaatcgaatatggcagcgtggcagctgcaagagaagccggaaaagtgcgcctggaaggaaaagactacgttgtccaggacggcgatgtcatgcatttcaggtttaatgtataacaggacttttggacgaatattcgaattgtattgaaaaaattcaaatcatccgttaaaataaatatcagtcgaatattttccttcggggcagggtgcaattcccgaccggcggtgatgaggaaactcaaagcccgtgacccgtattctccggaatgcggtggatttggtgaaattccaaagccgacagtaacagtctggatgggagaaggatcaggcgtttattggaacgcgtatttcattatgccgttttgccccgcacatcttcgtgcgggttttttgttttcacgggtgtatgttggcggaaattgaatacaggaggcatgaaaggattgcaaaaagaagattatatgcagcttgcactccaattggccgagagtgtggccgggcagacttccccgaatcccccggttggaagtgtcgccgtgaaaaacggcacgatcgccgggatggcggcccacttaaaggcaggagaaaaacatgcggaaaggcttgcagtggaacaagccgggccgcttgcaaagggcgctgaagtttttgtgacgctggagccgtgtactcattacggaaagacgccgccgtgcgcagattttttaattgaaaaaggcatcaaaaaagtatatatcgctgcattggaccccaatccgcttgtcgcaggcaaaggaatagaaaagctcaggcaagccggcgtagaagtggaaaccggggtattgaaggaacaagcggaaaggttgtaccgcccttttttccactttattcaaacgaaaacaccgtttgtcactgtcaaaaccgccatgacggcagacggaaaaattgcagctgaaacccgtgacagcaaatggatcacaagtgaagaagcaaggcgtgatgcccgctggttaagaagcaggcatgatgcaatacttgtcggcatacaaaccgttctccaagataacccccttctcaccgcacgtttgccccattccgggaaaaatcctattcgcattgtattagacacccatttgcgcatcccgccggaagcgaaagtgctaaacggcgatgcgccaaccattattttttgcggaagcgatgcaccaaaagaaaaagaacaatgtctgaagcagcttaatgccgaagtggcccgcatgccgcatgcccgcctcttgatccgtgacgtgttagcggcgctcggaaaaaaaggcgtgatgactttgctcgtcgaaggcggcgcggcggtaaacagctcatttttaaaagaaggcgcagtgcagcagtatattttttacattgccccgaaagtggtcggcgggcaaaacgcgccgtcccctttcggcggacacgggtttgacaaggtggccgatgctttgccgctccggtttgaaaaagtggaacagatcgggccggatttaaaaattacggctgccgtccaaaagggggtgccggagcatgtttacaggaattattgaagaaaccggcatattgaaacgcgtggaaagaggcccccgctcccttaagcttgccgtacaggccaggacggttcttcaagatgtgcggcccggcgacagcattgcagtgaacggcgtttgtttaaccgtcacttcctatacgcagcatgcatttacggctgatgtcatgcctgaaacatttttcagcacggcattggccgggctgaacatcggcagcaaagtcaaccttgaacgggcaatggctgcaggcgggcggttcggcgggcattttgtcacagggcatgtcgatggcaccggcacggtctgcttgaagcaaaggatggaaaatgccgtgtacatgacgatttctgttccctcctccctgtctgcctttctgatcccaaaaggctcggttgcactcgacggcacttccctgaccgtgttcggggcagcgggcgggcaattaaccgtttcattggtgccgcatacgcagcagcatacgatattgccggaaaaaaagattggcgatgccgtgaatattgaatgcgatattttggccaagtacatggccgggctgttcaggaacggagaatgggcggaaaaagagaccggcatgatgacgcttctgaaagaacatgattttatttaaacaaaggggtgaaaaacttgtttcataccattgaagaagcagtagaagacttaaagtgcggaaaagtcgtgattgccgtcgatgatgaaaacagggaaaacgaaggtgattttatcggccttgcggaaaaagcgacaccggaaatgatcaatttgatggccaaagcagggcgcgggctgatctgtgcaccgattacggcggaaagagcacagcagctcgatctttatccgatggcacggcaaaataccgacagccatgaaacggccttcaccgtgagcattgaccatgccgccactcgcaccggcatcagcgcatttgaacgtgccaaaacggtccggcacctggcagcagacggggtgaaagcggaagattttcaccggccggggcatattttcccgttagtggccaaagcaggcggcgtcctggaacggtccggccatacggaagcagccgttgacctggcaaaactggcaggcgcaaatccggcaggcgtaatatgcgaaatcatgaaggaagacggcacgatggcccgccttccccagctggaggaaatcgccaaaaattccggcataaaactggtgacgatccaatcgttaatcgagtacagaaaaaaacatgagaaactgattcaaaaagaagcggaaatcacgctgccgacgcgttacggcacgttccgggctgccggttacaaagatctgctgtcgggggaagaacatgttgcccttataaaaggggaagtaagcagtgaagagccggtgctggcaaggatccattccgaatgcctgaccggtgattgtttcggttccctccgttgcgactgcggcccgcagcttgcccggagccttgcgcggattgaaaaagaagggcgcggcgtcctcgtttatatgcggcaggaaggccgggggatcgggcttctgaataaattgaaagcttaccggctgcaggaaaaaggattggatacagtggaggccaaccgccggcttggatttccggcagatatgcgcgactactgcatcgctgcgcaaatcttaaaagataccggggcaacgcaagtccggcttttaacaaacaatcctgataaagtggaagcattggcgcgttacggtatccgaattgcggaaagagtgccggttgaaatcgcacctgtccgtgaaaatgaaggatatttgcggacgaaagcagaaaaaatggggcatttgctgcatatataggaggagatcaaaatgggacaagtatttgaaggcaatctggttggaaccggcttaaaaatcggcgtggttgccgcccgctttaatgaatttattacaacaaggcttgtaagcggggcaaaggatgcattattgaggcatggcgtcagagaagaagccattgatcttgcttgggtgccgggcgcgtttgaaatcccgctggcggcaaaaaagatggcagaaacggacaaatatgatgccgtgctggcacttggcgcggtgatccgcggcgcgactccgcattttgaatatgtaagtgcggaagcggcaaaaggggtcgcccatgcaagcctccatacaggaacgcctgtcattttcgggattctcacgaccgacacgatcgaacaggcgattgagcgggccgggacgaaagcaggcaacaaaggctgggatgcagcagtaagcgcgatcgaaatggcgaatgtgatccggaaaatagaagcatagtgaaacggatgcctcccccctgttgtttttgataaaaatttcagtccgtttttaataaaaagaccttgcaaaaggaacgtatgtttgataaaatgggaatgtcagcgatagccaaatgcgggatgaagtctttaagacatttgattttgcctgcgggatatggtatacttacgacttgtgagtaatgaacgcatgaaccattgctccttgcccttttacataaaagggccgcatagtccataaggaggtgacaaacagatgagaaagtacgaaattatgtacattatccgcccgaatatcgaggatgaggcaaaaaaagcgcttgttgagcgtttcgacaatgtcctcaccaaccagggcgcggaaatcatcgaatcgaaagagtggggaaaacgccgtcttgcatacgagattcaggacttccgtgatggttactaccatatcatcaacgtgaatgctgaaccggttgcagtccaggaatttgaccgtctggcgaagattaacggtgatattatccgccacattgttgtaagagaagaagaataatttttaacgataaaacgtttcacgtgaaacggactttgaatgatgagaggggttgattctgatgttgaaccgtgttgttctcgtaggcaggctgacaaaagatcccgatttgcgctatacgccgagcggagtagcggttgctacttttaccctggctgtaaaccgtacgtttaccaaccagcagggggaaagggaagcggatttcatcaattgtgttgtttggagaaaacaggctgaaaatgtggccaactacttgaaaaaaggaagtctggcaggcgtagacggccggattcagacacgcaactacgaagcccaggatggccggcgcgtgtatgtcacagaggtcgtggcagaaagcgtccagtttcttgaaccgagaagcgcgaatcaggaacgcagcagcagccagaattacgggaacaaccaagggaatgctttcccggggtacaaccaggatcaaaaccagaatcagcgcaatcaaagttattcaaagccggatgaagatccgttctcaaatgatggacaaccaattgacatctctgatgacgatcttccgttctaatgcggaaagacccgtaaagtgatgagataaaggagggtgaaaaaatggcaggtggacgcagaggcggacggaaacgccggaaagtatgctactttacagcgaaccatattacccatatcgactataaagatgtggacttgctgaaaaagttcatttctgaaagaggaaaaattcttcctcgccgtgtaacgggcacaagtgcaaaataccaacgtaaactgacaactgcaatcaaacgcgcacgtcaaatggcgttgctcccttatgttgcagaagacaaataagcagcggaaaaatcacccggatttttccttcaatatatgaatgaaaaaagacaccctgttttcaggttgtcttttttcatttcattatctttttgcttcatggatgggttatggtaaaatgaggggaaatgatggtttttttgaagggagcatgcgtgtgaaaaaaacaagaatgctgacagaaggggcaatgcttgcagcggttttcggcgtcatgctgcttgttgcattgcatgtcccggtgatccggataattgttctggtttttcttccgctgccttttatcctgttttgtgccaaatatcctttgcgttcgattcttgtcttttgtctggtttgtttgcttgtgtccgccattatgggaacagtcatggcaatcccgatggccgttttttttggttgtattggatttgttatgggatacgctatacagctaaaaaaatcaaaattatttatatacatagctaccagcctggcctttttagcagtcacgatcatcgggctgtttgccgccctgaagttattccatctgaatatcatcgcggaaaacttaaacatcatgcagcagtcaatcgaacagtcgaaatctcttgtcaacagccttggggaaccacaggcctatgaggaccggtttgcgcaaatggccgatgccgcaagccagatgtattctgtctatttgccgagcctgttattgctgtctgcctttattgccgttttggtgctgatttccgtggattttccaatcgcaaaacgtttcggtgtcccggttccgtcctttccacctttccgtgaaatgcggctgccggggaatatcttatggtatttcattctggcaatggcagccaacctgctgatgcgcggggacacgggcagcttctttgcgaaagcggtcctgaatctgatgctgatattccaaattctcattttgctgcaggggtacgcttttataagctttgtcagccacgagaaaaaatggccaaaaggcttactggctatcgccgtcattttatccatcatgttcagcccgctgctttatcttgtcatgatattcggtataatggatttaggatttgatttcaggcggatgattcaaaagtgatccttttttagtttctcaatataggagctgaaggtatgccttcttactacaataaacggttaatgcgctatccgttatacggcttaattgcagtatctttaatcctgctcggcattattttcttttaccactggtggataacggcagccggcattgttgtgctcggggcgttattctactgcgcattttacgtagaacagcggtcgaacgaagaaattgaacgctatatttccaatctttcctaccgggtcaagcgcgtcggtgaagaagcactgctggaaatgccgatcgggataatgctgtacaatgaagattacatcatagaatggacaaacccgttcatggcctcctgctttaatgaagatacgcttgtcgggcgttccctttacgatgtagcggaagtgctattgccgctgattaagcaggaaatgcattccgagacgatcagtttaaatgaaaggaagtaccgggtcgtcctgaaactggaagagcggctgctttattttttcgacattacggagcaggctgaagtcgagcagctgtatgaagacgaacggaccgtgattgccattatttatttggacaattatgatgaagtgacacaaggcatggacgaccagtctgtcagcaacctgaacagcctcgtgacctccattttaaacaaatggacaatggagttcggcctgttttttaaacggatttcgtctgataaatttattgcggtattcaatgaacggattttgcatgaattggaagacaataaattctcgattcttgatgaagtcagggaggccacagcgaagcaaaacgtggcgctgactttgagcatcggggttggcgcaggtgtcccgtcccttcccgaactgggggagcttgcccagtcgagccttgacattgcccttgggcgcggcggcgaccaggttgccatccggcaggcgaacggaaaagtgaaattttacggcggcaaaacaaacccggttgaaaagcggacaagagtccgggcccgcgtgatttcccatgcattgcgggaactcatgatggaaagggataaggtgatgatcctgggccacaaatttccggatatggatgctgttggtgctgctgtcggcatccggaaagtggcggaaatcaaccaaaaagacggctatattattttaaatccgagtgaaacggacacaagcgtcaagcggctgcttgaggagatcaaacagtatccggatttgtatgcccgcttcattacaccggatgaggcgcttgaaatggcaacggatgatacattgcttgtagttgttgatacgcacaagccttcccttgttatcgatgaacggatcgtcaggcggattgaaaatgtcgtggttattgaccatcaccgccgcggggaagactttattaaaaatccgctgcttgtctatatggaaccgtacgcctcctcgacatccgaacttgtaaccgaattgatggaataccagccgaaaaccggcaaaatcaatatgcttgaagcaacggccctgcttgctggtataatagtggatacaaaaagttttacattgcggacaggctcgcgcacgtttgatgcagcatcctatctccgtgcccagggcgccgacacggtgcttgtgcaaaaatttttaaaagaagatttgcgttcgtatatccagcgcgcccggcttgtagaaaccgttaaatttccgctaaacggcattgcggtggcaaaagggaaaaatgataccatttattcccctgttttaattgcgcaggctgccgatacgattttaacgatgaacggcgtcgatgcttcttttgtcgtcgggcggcgcagcgagaatgaagtggggatcagcgcaaggtcgcttggaagcgtcaatgtgcaaatcattatggaagcgctggacggcggcgggcacctttccaatgcggccgcccagctgaaaaatataacggttgatgaggcggaagaaaagctcatccaagtaatagaagagtatatggaagggagccaggaatcatgaaagttatattcctaaaagacgtaaaaggcaaaggaaaaaaaggagacattaaaaacgtggcggacggttatgcccacaattatttgttcaaaaccggggcggcaatagaagccacgcctgccaatctgaaaaacatggaagctcaaaaacggaaagaagaaaaactggcgcaggaagaactggaagaagccaaaaaactaaaagagaaacttgaaaacatcacggttgaaatcaaagccaaatcgggccaggacgggcgcctgttcggctcgattacaagcaagcaaatctccgaagaactgaaaaaaagcttccagatccaagtggataaaagaaaaatagaactgccggatgcgatccgcactttgggttatacgaaagtgccagtcaaattgcaccatgatgtaacggcagtgctcaatgtccacgtttccgaatagaaacggattttaccagctttctttttgcttcccgcgtgttaaaataatagtacgtgcagaaaaatgtggtccattttatcgtgatcacattttttctatttgaaatgagtatgcggttcttttacggcaaacgggttaccggttaaactgccattctccccggcatgcttcgttttggtgccggaaccggatgattcaggataaaatggaggattcaaaatgaatgaattgcaagaccgaattcccccccagaatatagaggcggaacaggcagtgcttggtgccatttttttggagccttctgcatttataacggcttcggaaattttgacggcagacgatttttaccggaatgcccatcaaaaaattttccaggtgtttgcgaagctgaatgatgccggcaaggcagtcgaccttgtaacagtggcggaagaattatcagccacccggcagcttgaagacgcaggcggcctctcttatttgagcgaactggccgcaagcgttccgacagcggccaatattgcttattatgccggaattgtggctgagaaagctttgctcaggcgcctgatccggacggccacccatattgcccaggaaggctatacgcgggaagacgacgtcgatgaactgctggatgaagccgaacgcagcattatggaagtggcccagcgcaaaaatgccggtgattttaaacatattaaagatgtccttgtcagcacatacgataacatcgaaatgctccataaccggaaaggcgacgtcacagggataccgacagggttttacgaacttgaccggatgacggccggtttccagcgcaatgacttgatcatcgtggcggcgcgcccgtctgtcgggaaaacggcttttgccctcaatatcgcgcaaaatgtcggcacaaagacaggggaaaatgtggcgatcttcagccttgaaatgggtgctgagcagcttgtcatgcggatgctgtgcgcggagggcaatattgatgcccagcggctccggaccggggcgctgacggacgaagactggcggaaactgacgatggcaatgggaagcctttccaattccggcatctatattgatgatacaccgggggtaagggtaacggaaatccgctcgaaatgccgccgcctaaagcaggagcacgggcttggcatggtggtcatcgactatttgcagttgattcagggaagcgcccactcccgtgaaaaccggcagcaggaagtttccgagatttcaagatcgctgaaggcgctggcccgggaacttgaagtgccggtcattgccctttcccagctttcacggagcgtggaacagcgccaggataagcggccgatgatgagtgatatccgtgaatcgggaagcatcgaacaggatgccgatatcgtggcttttttgtacagggaagactattatgaacaggacacggaaaataaaaatatcattgaaatcattattgcgaagcagcggaacggcccggtcggcaccgtccagcttgcttttgtaaaagagtacaataaatttgtaaacctggaacggcggtttgacgatgcgcctgttccggcatagcaagtatccgcatgaagcctttcctttccagggaaaggcttctttttttgtgccgtttacgaataaaaacgctgaaaaaatatataaatgttcggatttacattgactgatggcggtttaagctggtaaaatggtgggtggaaatcatgatttgtaaaatatgcggaggtgcactcaatgtcgtcagtggtcgtggtaggtacacaatggggggacgaaggaaagggaaaaattaccgacttcctctctgaaaatgcggaagtggtgtcccgctatcagggcgggaataacgcgggccataccatccgttttaatgggaaaacatataaattgcatttgattccatcagggattttttataaagacaaaatttgtgtcatcggaaacggggttgttgtcgatccaaaggcgctcgtcgaagaactggaatacctgaacggacggggcatttcaacggataacttgcgcatctccaaccgggcgcacgttattctgccttaccatatcaagttggacggtgcagaagaagagcggaaaggcagcaataaaatcggcacgacgaaaaaagggatcggcccggcgtatatggataaagcagcaaggaccggcatccggatagccgatctgcttgattacgaagaatttaaagaaaaactggcgcgcaatcttgaggaaaaaaaccggctgtttgaaaaaatatatgaaacggaaggctttacgctggaagaaattttggagccttattacgaatatggccagcgctttaaacaatatgtctgcgatacgtcagttgttttaaacgatgcgcttgatgcgggcaaacgcgtcctttttgaaggggcgcaaggagtcatgctcgatattgaccaggggacttatccgttcgtcacatcatccaacccgattgccggcggcgtgacaatcggttccggtgtcggcccgtcgaaaatcaaccatgttgtcggcattgccaaggcttatacaacacgtgtcggcgatggtccgttcccgacagagcttctggatgaaaccggcgaccggatccgcgaaaccggccatgaatacggcacaacgacaggaagagcgcgccgtgtcggctggttcgacagtgttgtcgtccgccatgcgcgccgggtgagcggcctgacagacttgtccgtaaacctgctcgatgtactgaccggcattgaaacgttgaaaatttgtgtcgcctaccgctataaagggaaagtgcttgaagcgtttccggccagcttaaaagtgctggccgaatgcgaaccggtttacgaagaactgccgggctggacggaagatataaccggctgccgttctcttgatgatctcccggaaaatgcccgccattatctggagcgcatttcccagctgaccggtgttcccctttccatgttttccgtcggcccggaccgcctgcagacgattgtggtccaaagtgtctggcgggtatgatggaaagcccagatgaattgattttgggctgccggataaagcggcggcggaaacgtacctggaaccacgtggaaaaaaacgatgaaaaagggacgccgggcaggcaccacaaaaagcggtttttatcccggaatgtccaatagaacggaaaaacggcgtgatctcataaaaggggtttctcgccgtttttattttattttaaagtggcacacgttgcggctgccatgcttaaaaatgaacgtttgctgaaatttccatacccgttagcttaaaaaatttgtagaaatgtgttgcaaaatggatgatagatatgataacattacttctgttgttacaaaatgcacaatggtcccgtggtgtagcggttatcacgcctgcctgtcacgcaggagatcgcgggttcgattcccgtcgggaccgccattttacttatacatatttgttcccggttcaggcccggtagctcagtcggtagagcaaaggactgaaaatccttgtgtcggcggttcgattccgtcccgggccatttactaaaaagcactgcgatgacttagactctcgtagtgcttttttattatactatacggcccgcccggcaagacaaaatggaaaacagaatgcatgccggatccccggcgcctttgatagatattaccaggggcatggtttcagtagaattggacaatttttatgcaagtaagttaaaattataatagtatggctgctggaagctgcctgtgaatccttgatacagagcagcaatgcttctggatttccgggggcattgctgttcgccatggttcggggaaaatgaaattttttaggaacataaagataacagaaaattgtagatagatgtcaatcaatgaaaatggcgcattttaaatgaaggagtatggacgatggacaaaaaaatcttgatcgtggatgatgaaaaaccgattgccgatattttgcagtttaatttaacaaaagagggctatacggtgttttgcgcctatgacggcgaggaagcactggaaaaggtggaagaagtgcaaccggatttaattgtccttgatattatgctgccaaagcgggatggcatggaagtttgccgcgaagtgcggaaaaaatacaatatgccgatcattatggtaacggcaaaagactcagaaattgataaagtgctcggccttgagctcggtgccgatgattatgtcacaaaacctttcatcacccgtgaactgattgcccgcgtcaaagcgaatttgcggcggcaccagcagacgcccccggctccgggtgaggaagaggaatccaatgaaattgcaatcggttcacttgtcattcatccggatgcttatgtcgtctcaaaacgcggcgagacgattgaactgacgcaccgcgaatttgagctgctccactatctagcaaagcatatcgggcaggtcatgacgcgcgagcacctgcttgagaccgtgtggggctatgactattacggcgatgtccggacagtggacgtcacggtcagacggctccgcgaaaaagtggaggataacccgagccatcccgagtggattgtgacaaggcgcggtgtcggttattatttgcgcaaccctgaacaggagtagccaaatgaataaggtgaaattcttccagtctattcactttaagtttgtcctgatttatattttgctgatcgtcgtcgcgatggaaattatcggggtgtattttatcaacaagctggaaaaccagctcgagacgaattttaaaaaatcgatatacgaccaggtcaatgtgcttgaatacagtattgaagacctgctgacgaaaaagcagaaccaggcggcggatattacgctgaaagtgagaaaagtgctgggtgactttaaaagtacggatgtttctgaaatccggctgattgacgcgcacagcggcgttattttgggcacttcttcgaatgaccagagcattgtcggccaaaaaacaaccgaagatattgtcaaaagcgtccgtgtaaccggccagccggaagaccagatttatttggacaagcagaccggcgaccgaatgtgggtgctggcttccccgattaaagcaaacggcgaaatgatcggtattatttaccttgtctccaaaattgaaacggtttaccgccaggtgcaggcgattaaccagatttttatgacggggacggttattgcagtgctggttacagccctgcttggcgtcattaccgcacgcacgatttcaaagccgctcagggagatccgcaagcaggcgatggcgatggcacgcggcaattttgcccggaaagtcaaagtgatcgggaatgatgagatcgggcagctcgcttattcgtttaaccatatgaccaaaaagctgcaggaggcgcaggccagcacggaaggcgagagaagaaaactcgactccatcctgacccatatgacggacggcgtgattgcaaccgaccggagaggacggattattttaatcaacgagccggctgccgagatgctggatgtttcacgtgaaacagtgctttcccagccgcttatatcggtattgaaaatcgaggatgaacacaggtttgatgatttattgacagagcaggattccgtcatccttgatttcagtacggaggaagaaccatacattttacgggcgaatttttcagtgattcaaaatgaagccggctttgttagcggcctgattacggttttgcacgatgtcaccgagcaggagaaaatagatatggaacgccgcgaatttgtggccaatgtatcccatgaattgagaacgccgctgaccacgatgagaagctatttggaagctttgacagacggggcatggaaagatgagaaaattgcgccgcagtttttaggcgtcacgcaaaatgaaacggaacgaatgatccggctggtaaatgatttgctgaagctatcaaaaatggacagcaaagacgaacatttaaataaagagtgggtcaattttgtggaatttttccactatgtcattgaccggtttgaaatggcaaagcagcaaaatgtcacgttcaaacgcaaactgccgaatacggaaatttttgtggaaatcgatgaagataaaatgacccaggtgttgtacaatattatatccaatgcattgaaatactcccctgaaggcggccagattacgtttaagctgagggaactgaacgaaaaaattgaagtcagcatttccgaccagggcgtaggcatcccgaaagaaaacgtaaagaaaatttttgagcgcttttaccgcgttgataaagcacgcagccgcaaactcggcggaacagggctcggccttgcaattgcaaaagaaatagtggaaatgcacggcggaagcatttgggcaagcagtaaagaaggaaaaggaacgaccatttactttactcttccctacgaaccggcacaagaggatgagtggctatgagtcttgaaaaagtaaaaaccatcatattgacgttgctcgtgcttctgagcttgttgttaacatggctgatctggaacaaccagccgaattatgactggctcaatttaaaagatctggacaatatcgcgattgcgaaggaaaaaaaggtacccggtatcatcctccctgacaaattgctttaccatgaggatgacgggacaaccggcacggttcatgacggggaaatttcacgggtgatgaatctgcttcgaacatggacatttgatatgagcagttcccgcctgttgtcaaaaaaagatctttacaatttaatgcacggaaaaaacaggattgaattggactttccggcccctgtcccgttcagtgtctatcaatcggttctgaactttgccaacaaaaaggtgccggatgccgattttgaccatattgtgatcgaattaaacaaaggaacaaaaaacttaaaccatgtttattttatttcaacggcgtccaataaagtgtatgaggcgagcacagaccaaaaatccattcaggtgttcatctcaaagctgaacgacaacaaaacgttgtacaaaccgtatactgcttttgccctttccggtccgagaagaatctacctgcctgccggaaatccggtggtgaaccagtataaatatgcgacaaccgacattgaaattgataaatttaaaaaagcgctgtttgccgatccgaactttgtaaagaaagtggcgggggaatatacaaatggcatcagcctgttgcggacagacgaatccaataaagtcttaaccttcgtcaatccaggggaagacatcgggtacagctccgatccgaaccatctgttggcgcgggccattgattttattaaccagcacagtggctggacggaccagtaccagtattttgaaatcaatgagcgggaaaatgaagtcacgttccggctttttaaagacggctatcctgtttttaacgatgacggcatggcggagatccgggaatacctgggccgaacggaaatttacaaatatgtccgcccgtatttcaacctgtcgctcaacctgccgttaaaaccggctgttgttaaactcccgccggctcaagatgtaatcgccagcttgcaggaaaacccttccgttcaaatgaacaaggtgagagatattgcagtcgggtaccgtttgcaaaaagacagtgacgatatcctttcgctgcaaccggcctggtattattgctacgacggaatatggaaaatggcagggggggatgaagatggactggagtaaaacaaaaacaatctttattcttgttttcctggtgcttgatatttacctttcctgccagttgtatttcaaacatgtcaaaaatcagtatgaagtcatcggcagcccgacagctgaacaaagcctaaaggctgcaaatattacattcgtcgatctgccgaaaggaaaggcaaaacggccgtatatcagcgcggaagaaaaagtatttaccgcaaaagacttgaaaaaattgaaaaaccagcaggcggaaatcgtgaacgggcagaaactcagttccgtttttgataagccggtgaaactgggcacaaaaatcaaaacggaccagctggaggcggttatccaggaaaatatgctctacggcagccgctataaactgtggaactatgataaagacttgaatcaggccgtcttttatgagacatataacggaaaaatgatttttaataataagaacgcgaaactgaccgtgtatttaaatgaccggaatgaaatcatttcctatgaccagacgtatttgaccaatattaaaatctaccgggaagaagaagagacgctgtcggcggtaaaggcggtggaggccttatataagaaaggaacgctgaaaccgaacagcacagtgacgaaggcggaactcggttactatacgagggtgcccgaactccaggtgcttgtgccgacatggcattttacggtaaaacacgggaatgaaacagagcaattatttatcaatgcatttgaaggccaggtcaacgaaatggaaaatgcacaataattttggagaggatacgatggggatgcaatttagtgtacttgcgagcggaagcacgggaaatgcgatctatgtggagacggagcagcatgcttttttagtggatgcaggtttaagcggcaggcaaatggaacaactttttgggcagatcggccgcaatattgccgatttaagcggaatccttgttacgcatgaacacagtgatcatattaaaggaatcggagtgctggcgcggaaataccagctcccggtttatgcaaatgacaaaacatggtcggcgatggaaggcatgattggagagattccaacagatttgaagttttcattcgggatggaatctgtccaatcgttcggaagccttgagattgagtcgttcggcgtttcccacgatgccgtccagccgatgttttatatttttcatgaaggcggcaaaaaattggtcatcattacggatacgggttatgtcagcgaccggatgaaaggaacgatttccaacgcggatatttttgtttttgaaagcaaccacgatgtggaaatgctccggatgggaaggtatccatggagtgtcaaacagcgcattttgagcgatgtcgggcatgtgtcgaatgaagatgctgcacttgcgatgggcgaagtaatcggggaccggacaaaacgaatataccttgcccatttaagcaaagataacaatatgaaagacctcgcacggctgtcggtttcccaaacgctccaggaacagggcctggctgtcggtgaaactttttcattatatgatacggatccgaaaattccaacggccttaacggctgtttaaccgcggcgatccggcggcagaatctgtcgctgcggactccccccaaccgcgggggcagctgttttaccggcaggcgggatagagttctttttattttggcgcttgatttttagtaatttttaatttcagccattataatggaatcagaatgggcaaaaaagggatccttcaccaaacttcaattttcctcatcagtacagaaagggtgatgcgcaatgggatattatgatgatcaggatggccaacggcgtggaaaagaaaacaggcggggcggcggaaggtttggctattttctttccgggctgattggcgtaattgtgggggcgcttgtggtagcccttctttttccaagtatttttggaaaaacgaacccggattccgctgcggtagattcaaattctgtggcaaataccagcacgtcaacggcaaaaacaacgaaaaccgtctcgttaaaggtgacaaccgatattacaaaagcagtggaaaagacggagaaagcggttgtcggcgtctcaaacattcaaaaacaaagtatttggtctgatgatatgtttgggcaggactcaaaatcttcttcttcccaggaagccggatccggttccgggattatttacaaaaaggttggcgataaagcttatgtcgtcaccaattaccatgtgattgaaggggcaaatgcgctggaagtgaccttatcgaacgggaaaaagctttctgccaaacttgtcggtagcgataaatatacggatctggccgttcttcaaatagacggcagcaatgtgacaaccgttgcccaattcggtgattcggatgcattaaaacttggagaaactgtcattgcgattggcaacccgcttggtgaagaatttgccggatctgtcacagaagggattgtttccgggttgaaccggactgttccggtggatatcgatgaagatggaacggaagactggcaggcagaagtcattcaaaccgatgctgcgatcaaccccggcaacagcggtggtgctttagtcaatattgccggccaggttgtcgggattaactccatgaagatttcaaatgagtcgattgaaggcattggattttcgattccaattaattctgcaaaaccggtcatccatcagttggagacaaaagggaaaattacccggccggcattgggtgtcgggattgtaaacgtctcggatatctcggcttaccaacagaaggaaacgttaaaattgcccgccaatgtgacgaccggcgttgtgatcggctctgttgaaaaagggtcccctgcaagtaaagccggtttgaaagaatttgacgtcatttacaaactggacgatcaaaagatagacaacatcgtggaattaaggaaattcctgtatgagcataaacagcccggtgataaggtgaaagtgtcggtataccggaacggccagccgaaaacattcacattaacgctcgggaccgcttcgggaagcaattaacaaactgcggaggaaaggcggaaagcttttccttcctttttttgcggcattcagttatcaacagggcaaagcgtgctgcggaccgcagcggaaatgaacattttgttgaaaaaaatttttatacgggtggatatttgtggaaattgctcgaaaagaaggttataaacaggctgtgaatagcgaaaaatggtgaaatatatcttgtatggaacggttattcccacacaaaatgtggatagtttctgtggatatgtggataactcttgtcaatagcttgtgggtaaggtgggtgtaagttgtgaatatctctatcgttacagtgggaaaattgaaagaaaagtatttgaagcagggcattcaggaatatttaaaacggctttccgcttacgcaaaagttgaaatcatcgaagtagcggatgaaaaagcgtccgaaatgctgagtgcagcggaaatggagctggtaaagcagaaggaaggcgagcggattcttgcaaaaatcagcccggacacctatgtcatcaccctggcgatagatgggaaaatgaaatcgtcagaagaactggccggttccctcgaccgtctggcgacatacggcaaaagcaaagttgcctttgtaatcggcggcagcctcggcttaagccaagccgttctcaagcgcggcaatgaaagcctctctttttcgaaaatgaccttcccccaccagctcatgcggctcattttagtcgaacaaatttaccgcgccttccggattatccggggggaaccgtatcataagtagatgaggtttttataatagtatatttaggtaattatctttttaattgaggaaaacgtatgtgtaaaatttctgagtgggccaaggttaggacgcccatccagaacggaagacaaaaccttggaacgcgtcgcaaggcaggatgcctctgaacgtaatgccgttgaaggcaaatttggcgaaggcaagcgcaagtatgggctgggccttattcgagcacgccttcaggagaccagcgaaacagtagtagcccttcaattcctcatactgaatctggagcgcaagctcagggttctttttttgaaatttttacacaacactattttatattttgataatcggaatttggcttgtatctgaccaaatttgattcgttcagcaagccccagttatttttccttttttatgggcttccgcaagtcgggatcaaattttctgccgaggtttgcgggattatcgggattatttttcttggcggcagttatatggcagaagggttttccggagggcttgcaggcgtttcgaaaacgcagattgagtccgggcttgcgatcggtctgagcaggttccagctggcacgctacgtcatctttccgcagggattgatgctcagtgtcccggcattcgccgcaaatgtcatttttttaatcaaggaaacctctatctttaccgtgttggcgattccggaactgaccaacacggcacttgacttgatcgggatgtattacaacacgaatgagtatctgtttatgctcgttgtggcttatgccatcattttaattccattgtccatcttgctgacatggctggagaagaaggtgcgttatgggacatttgggaattaatatcttttttgaaggagccaactttttacgtttactgggtggattatacgtatcggcaaaaattgcttttctgtccatcgttttcggcggtatcctcggcatcgtgctgggggttttaaggacattgcacaatccgttgctccgccttttactcaggctgtatttggagtttttccgcatcgtgccgacgattgtcctgttatttttgttttactatattctgccgcaaagctttaacatcaactataaggcggatacggtcgggacgattgtcttcagcctgtggatggctgctgaaatgagcgatattgtccgtggtgcgctgatttctgtcccaaggcatcaggtggaatccggaaaagcggtcggtttaagcacggttcagctttaccggtacgtgctgctgccgcaatcagtccacttaatgattccggcgaccattaacctgatgaccagaataattaagacgacttcccttttgctattgatcagcgtagtggatgtcatcaatgtcggccagcaaatcatcgaagcgaatagccaccgctatcaggatggtgcgttttggatatacggttttatatttatcctgtatttcattttatgctatccgctttcccggctggcaaggcggttagaaaggaggggcaaagcaggggctaatggctgaacctttactgaaagtcgaacatttaaaaaaatcgtacggtgaaaaacaagtgctggaggatatctctttcgaagtggaggaaggcagtgttgttgttctcctcgggccgtcgggatcgggaaaaagtacattgatccgctgcttaaacggtctcgaagccttccagggtggcaccattctgtttaatggggaaaccgtgcggccgtcgtcgaaaaattggcgcaggctcaggcagcagatcggaatggttttccagagctatgatctgtttccgaatatgacggtgttggaaaacatcctgctcggtgcagtgaaagtccagaaacggaaaaaagacgaagcggcgcgccaggcaatgggcctgttaaaggaagtcggcatggagcagtatgccaatgcctatccgcgccagctttccggcgggcagaaacagcgggtggcgattgtccgcgcgcttgagctgaacccgaagctgatgctgtttgatgaagtgaccgcctcgcttgacccggaaatggtgcgcggcgtgctcgagatcatcctgcggttggcaagagaaaagatgacgatgattgtcgtcacgcatgaaatgaattttgcccggaaaatcggggataaaatcttgtttttggaagacgggaagattctcgaagaaacccccggacgccaatttttcacaaaaccgcagacagagcgggcgaaaaattttctggaaagcatggatttttaaaagaaaaatattttggagggttagaccatgaaaaagcatcgtttgtttggtttggtttcagcatttttattaattttgtcgctggcgcttgcaggctgcggcaaaagttccggcaattcttcaagcagcaatccgtccagtgtttcagccattaagaaaaacggcacgatcaaaattgccgtattcggcgatcttccgccatacggatgggtcgataaaaacgggaaacgccagggatatgatgttgcgctcgccaaacaagttgccaaagatcttggcgtaaaagtgaaattcgtgcaagtgaatgccaacagccgtgtggatgcattgaaatcaaataaagtggatctggttctggcgaattttacagtcacaccggaacggaagcaagttgttgattttgccaagccgtacatgaaagtttccatcggtgttgtttcaccgaagaaaaagccggtcacaagtgtcagccaattaaaaggcaagtctttgatcgtcaacaagggcaccactgcggaaaactattttacaagcaaacaaaaagatgtgaaattgcaaaagtacgattccaaaacagaacagttcaatgcgcttaaaaacgggcgggccgttgcactggcggacgacaattcctacctgtatgcctgggtgaaaaaccatccggattatacggttggcattaaaacgctcgggccgaaccaatatattgcccctgctgtgaaaaaagggaatcaatcgctcctcaattggatgaacaaagaaattacgaagttaaacaacaatggctttttcaaaagtgattacaacaaaaatctggcgccatattttggcagtgatatccgtgcggaagacatcattataacgaagtaaaaaaggcaggctgccgtttttgcagcctgcttttctttaattggcggggcttttttcggtttccgcgggccggctttgctttgttccgcgcgaaagcagaaactgttgtttgtaaggcttggttgtggccgcaccatggacgtacgttttataaacatatggagacgtcatggctctcagcatcgcgccgtagtccatataaaatctcacctcatcgcccggcacgagaaccgcattttgtgtatccaaaatgatatggtcgctgcttgagccaatgatatagaacggccggacaggggtaaggcctgaaacaagcacatcatgccgccctgcactgacaatcgtccgccttctgttgcctctgtcaataaaggtgacctgttccccgaatgcatttttgccgattgtcccatacggcacggaaggtttgatttttgattcgatgacttcggcaacaaagcaaaaggcatcctgatataaagacggaatggtatgcccgcctgatgtttcgcggcccagcaaaatggactcgccgagccgcacattgtttacggccccggcgtcttttgtttttacggcccagttgtagttggcggagttgccgccggaaacataaggaagtttgagggaaaacagctcctgcatggcatggacaaaccgggaaaacgcctgcatcttctgttcggtcgggagcacgcctccaaagcaggcaaaatttgtcccgattccggccagttcaatcccggggcaggttaatatttctctgatcacagcaggggcatcttttaataatatgccttccctcaaatctcccatttccaccatcaggatgattttatgggttttctgttgccgcaccgcttcagcggataatgcgcggatcgtatccagctccgtgttcatgctgatatccgcaaaccggaccgttttttccgcttcgctgatcccgggggcacggagcaaaatcaaatccgccttgattcccgcttttctcattttttcgatatttgcaatcttcgagtctgcgaggcttttgatgcctgcatccaccagggtgccggcaatttttaaatcggctgcgacacctttcacaacgcctgtaatgctgattcctttcctcccaaataattgttttaatgttttcgcattatgccggatcttctccagattgatttccacccgtggcagaacggccatcaggaaaccactgcctttttcagggaagggaagaaatcgatcagggcgtttatgattttgtctgtgccggtttttaaaacatccgtaaccggaagatggtaagtttcttcatagcggcggatggtgtcttccagttcgctgtctgccattccatcatggttgagcgtaatgccgatgacttttgtctttccgaaatgttcaatcaggctgatttcatcttccactttcggcacttcggcaaatggaaaatcggataaatattttcgtttcggggcgtgctgtaaaatgactgcttgcggccttgctccttttaaaatgccggttgagcttgcatatgccgggtggctgagcgcgccctggccttccacgatgataatatccgggtgttcttgtttattggcccgcaaaatttcgcgttccagttcgccgattaaatattggagcgggaaagcatccatcgcaaacccgtacttggcgccctggatcaaacctgtctgcccggttgcgataaatgccgggcggtagcctttttccatgaatgccttttcaatgcatttggcggttgtccgttttccgcaggccccgtctgtcccgagcacggcaacgacaggggtgttcattttcaaaatttctccggtaaacaaagtccattcttttttcggccgcggtttacggatatcgcggatcgtgacaccgcaagcctttgcatgggccaccatttcttcatcatcggttaagaattcctggagcgggttaatgatgttcaatccggcttccattgcctgcaggatgacttttctttcttccggctttaaaaaggcgttcgccggcgcgatgccgaaaatgaagtcatccggtttcgggccggagtggatgagcgcgtcttccaggtctttgcaaaccggaatgccgctccatttgttgtcgaggagcatgccggcatcctgcccgtgtttgctgctgtcaatgacggcagtaatggtgtaattcccgggttcacggatgagcccgtttgctgttttgccatctgttgtgccaaattggttttcgcaatacacaattgcccgctttttcattgccatccctccatttattgaaatttaggcaacacaaaaagaacacctaatggcttcaaatagtaaaaatactaaagaagatagctgtccgggtttacgtatgggcatgccggaaaccccaggttattggaagcttccaaatattattataacaatgttgtggaaaaaagggaagccggaagcatgcaaccaggacagcaaaaaaaggggcaattccgctgccaatccggcatttggaaaagccccttgcatttggaacggcgggcattcacccgagtctcattttaaagtcgtgataaccgaactcacggacaattgtgcaatcgccgtttttgtattggatcgcgatggccggaagcggcatgccattaaaggtggtgtttttcaccatggtgtagatggccatatcgtcaaatacaaggcggtcgccttctttaagcggcttatcgaaggaataatcgccgatcgtatcgccggcgaggcatgtttggccgccaagccggtacgtatacggtttttcgcccggctccccggccccgatgagcggcgggcggtacggcatttccagcacatccggcatatggcacgaggcggacgtatcgaggatcgcgatgtccatgccgtttttcactgtgtcaagcactgtcgtgacaagatagccggcatttaaagcaacagcttcgcccggctcaaggtagacttccaaaccgtacttgtcctgcatccgcttgatgcatttttcgagcaagggaatgtcatagccttccctcgtaatatggtggccgccgccgaaattgatccattccatttgcggcagccattccccgaacttttcttcaacggcattcagcgttgtctccagatcgtccgcattttgctggcagagcgtgtggaaatggaggccggttacgccgtccagaagattagggcggaactgttcctgcgtcacaccgaagcgcgagcccggcgaacaagggtcataaattgcatgcccggtctgtgtcgagcattccggattgatgcgcaggcccgcctttttcccgcctgcaagcacgcggcctttgaatttctcaagctgtgaaaatgaattaaaaataacatgatcgcaaatcgagacgatctcatcgatttcatcttcacggtaagcggcggaaaaaatatggttttcttttcccatttcctcatgcccgaggcgcgcttcatacaagccgcttgctgttgtcccgctcaagtatttgccgatgagcgggtacaaagcaaacatcgaaaaagctttttgcgccaaaacaattttacacccggtccgtttcatcacgccgtttaaaattttcaaattgtcttcgagcttttgttcatcaactacatagcaaggcgtcggcagttcttcaaatcgcatcagtcgacaagctccggattatagctttctttccacggcaggccccatttgttcagagcttccatgaacggatcaggatcgaactcttccacattataaacgccttttctgtcccatttgccctggatcagcatcatcgcgccgatcatcgccggcacgccggttgtgtacgataccgcctgcgagccgacttctttgtagcaggcttcatggtcgcatacattgtaaaggtaataggttttgtccttgccgtcttttttgccgcggaaaatgcagccgatattcgttttcccttttgtgcgcgggccgagggaagccggatccggcagcacagctttcaaaaactgcagcggcacgatttgtttgccttcaaattcaatcggctcaattgaagtcatgccgacgttttccaggcatttcaaatgtgtcaggtaactttcgccaaacgtcatgaagaaacggatccgtttaatgccagggatatttgcggcaagcgactccagctcttcatggtgcagcaggtacatgtcgcgttcgccgatttcaggaaaatcatacacgcgtttgatctccatcggttttgtttcgatccatttgccgttttcccagtagctgccgttggcggaaacttcgcggatgttgatttccgggttgaagtttgttgcgaacggatagccatggtcgccggcattgcagtccaaaatatcaatataattgatttcatcaaaatggtgtttcagggcataagcggaaaatacgcctgttacgcccgggtcaaagccgctgccgagaagggcggtaatgccggcttcttcaaaacgttcgcggtatgcccattgccatttgtattcaaattttgccgtgtcttccggctcatagttcgcggtgtcgagatagtttgtttttgtttgaaggcaggcttccatgatggttaaatcctggtaaggcagcgccagattcatgacgacatccggtttcactttttcaattaaagcaaccagttcatcgacgtgattggcatcgacctgtgcagtcgtcactttcgtttttccgccgtcaagctttgcttttaacgcatcgcattttgatttcgtgcggcttgcgatgcagatttcttcaaagacttcgctgttttggacacatttatgcgcagcgaccgatgccacgccgccggccccgataatcaacgcttttcccattcttctgtctccttcaaatagaatttttgcataataaaaagcaagtgcaatccgcatacgtgcgcacaacacttgcttgaaatcatcatcctaaaaaagcatgcatatccgcataaacagatatacgcctgccataaaagtccgtggacaatatggaagaaagctttatattcttataggatcagagtctatatagcaaataattacttttaccactcttattgatcgtttcacaagttgatgtgcacaagcaccggttgtaaagtaaccaacttataaaatttgagtttcccactcaatcaataaggcaaccaaaagttgccgattcggcatttggcccggcacaccgatgcctttactccactggccaaaattatctgcttggaaagactcctgatgctgaatatatgccttccaaatcatgctcttctatcgtatcagcacggacttaaaatagcaagaagaaaaattttcttaaaccatatcgggacggctgcgtttcaaagggggctcctccccggatctctattttccaaaacgggatgcccggatggctgaaaaaacgccatcattccggcatgagttccagttttgagtggatcgttacgtcattaaaatcaatgcccaattgaatggcagtttgcgccacctctggacggatgccggaaagaatgctttttaccccgattaaccgcagcgtctcaatcagccggaaaatttgctgggcgaccatcgtatcgatgacgaccacgccggataaatcaatgtacagaaggagaacgcttttttctgcgcattgttcgagtgttttttccagaataattttcgcacggttggaatcaatttccccgacaagcggcagcagcgcggtatttttgccgaccataatgacgggggaactcagctctttaatcatttcctgctgggactccaaccgctttaaggaataatggtggttttctttcataaaccagagcatgacatgttcgaatgtccggatgatcgcccttctccaaaaattcagttcctcgtatgtatattttccctcgtgggctgcaacaaatgaatcaaacagatcgagatattgttcctgcgtgtggaagaactcgcgaaaaataaagtggttcggtgtggaaagatgctcttcatcctgtgcaacgttcattacccacttttcaaaatggtgtaaaaatgtatcttcatcttttaaaaacacttcacaaaactggacgtggaactcgtggttttgctctttcagttttgcaaccacttcggggtcggtggacgcataaaccccctgcacggtgcttttgtcgagcgatgcgtaccagtcttccgtcaattgccatgttttttcaaggaaaaattgatgcaatgcctgtcttagctccattttatcacccgcatgatgtaagatttaattgattatcattatcattttcgcagtttcttgtccttttattttaaaataaaattctatttattgaaatagatatattgtatttggaaaagaaaaaacccatttcctctataggatgcaaaaaaaacggtgggacacgattcatgatggtgtcccgccgtttttatggtttcaatgagactttttttcagcggcttcgaaacgccggccggattttcctgctgttattttaacgcttgccactgccagttttcgatttccggcagatcagtgccttcttcgcggatgtacgcgtgatgcttttgcagcatgccgtccatttcgctgatgagggttgcatgccgggatgcatcgggcaggcttgacaccacttcttttacaaggtcaaaccggtccatctggttcatcacgcgcatatcaaacggcgtcgtgatatccccgttttcacggtagccgtgcacatgcagattgcggtttgcacgatcaaagaacaagtctttgatcaggctttcgtagccatggaaggcaaaaacaaccggtttgtcctttgtaaaataggcgtcgaacgcttcatccgaaaggccgtgctaaaaaaaaatccgggaatgacctggaagcgggcggggaacgatgccgcacattggttgagcatgccagcgactgaatttgggaaaaagaatgaaacaagcaccgttccagaacatggaacagtgcccctccttagttttcgcccgtttcctgtacccagacagaaacgctgccgccgttcaccggaaatgccgcatagccgtcttcgccaattgtaattttttcctgccggttgccggtggcgtccacccaaacctcgccagcgcgctcttttccggcaagcattcttttttcgccgttctcgccgtttgagatgacgacggcacagccggaatgcggcatctccggaacgccgcggcgtacccagccgatggtgttcggatggtcaaaataatcatcctgctcgccatacgctttttcccgccggacagataaaagcggggaaagggcgcctttttttccgggaatcggatggtcgccgccgatgccgtacatatccccgtaaaagacgcacggataaccgtctttccgcagcaggatcaaagcataggcgctctgcttaaaccagtcgtccacccatgattccagcgattcgttcggctgtgaatcatgattatcaacaaacgtaacagcattcagcgggtgcgtttgaacgagtgtatcatgaaaaatcgtcgtgaggtcaaacgcgcgcccttttttagatgcttcatgcaatttataatggagtgcaacatcgaacaaatcgattttaaactggacatggtcgaggtatttttggcacgcttccagctgcggattccagaactcgccgacaaaataaaaatggtctccgcggtgttccattaaggcagcggcaaagtcgcggataaagtcatggttgatatgcttaatggcatcgagccggtagccgtcacaaccggtcgtatcggccagccattttccccattcgatcatttctttttttacatccggatggttgtaatcaatgtccgcgtacatcaagtaatcaaagtttccaaattcgttgtcaacatgctcactccaatgcttattttccccgacaatacggaaaatgccgttccgccctgtccggttgtcgtaatcgacgccactgaaatgggtatgattccacgtaaaatcagaatacttgcctttccggtttgtaaaattgaactttgtccagccttctatttcaaacggttcggaaatttctttgttgcgatccatcgggtcgacctccaccacttggaaagattcggtttcatccgcgcccgctttatggttcatgacgacatcgatatagacctggatatcgtgctcgtggcaggcgttgatcgcttcatgtaattgctgttttgtcccgtactttgtcctgacggtgcctttctggtcaaactccccgaggtcgtaatggtcgtacaccccgtaaccattgtccatgtctgactgtccttttgtcaccggcggaagccagacggcatcaatcccgcttttctttaattcaggcgccatttctttcagccggttccaatggctgccgtctgctggcgtattccattcaaaaaactgcatgattgtatgattccgttccaagaaaactgccccttccaaaagaagtaatagttgatgcgtttagtataagtgaacatgaaaaaattttcaatcaattatgattttaagcatgacaaaaggcgaagagaacaaaggtactattcccgctttcgtttcacgaaaacatctttttacaagcaggttttccttttgtttttccaaaaatggtttaaatccagcccccggctctcctttgcgccccgatttggttgtttggccggtttatctataataatatagtgataagtctgtaaaaagggtgggaaaccgatgaagaatgtgctggaaaagtttacgggagcatgcgccggaaggagagggagatgggtaacgcttgctgtatggatcctggccgtggccgttttgtctgccgtttttccgaatgtgaataaagtaacggataacagcgcagcaaatctgccggcttcagccatgtccgaccgggctgaaaaggtggccgaaaaacagtttccggatgcaggcacgccgcttcttatcgcctggtaccgcgaaggcggcctctcgcagcaggattacggaacgattgctaaattgtacgcggatttaaagaaagacccgcttcccgcacaaagttttatcccaccgtacgaaaaaatgccgtcgcaggtactgggcagccaggcttcaaaagacggcacaacgattgccacgccggtatttttgaaaaagaatgcagggacggatgaactttccgataacttgaaagaattgaagaagagagtggcatccttcgaatcgaaagccgttttgaacaagaaactggcggatgccggcctgcatgtccgcttcacagggcctgcgggcatttccacggatgcggtgtcgctttttagcaaagcggatatcaccctgctggtttcgaccgtgatgcttgtgctcgtgctgctgattgtattgtaccggtcgccgattctggcgcttgtcccgctcatcggtgtcatatttgcttacggggcaatcgggccggttttgggttttcttgcaaaagaaggcaccattacagtggattcccaggccacttcgatcatgacggtccttttattcggagccggcacggactactgtttatttctcgtttcgaaataccgggaatgtttgctggaagaagaagacaagataaaagcgctggacacggccatccggcattcgggcggcgcgatcatggtcagcgcgattacggtcgtgctcagcctgttcacattgctttttgcgcactacgggacgtatcagcggtttgctgttccgttcagccttgccatctttatcatgggcattgctgcattgacactgctgccggcgctgctttccattttaggccgggcttctttctttccgtttattccgagaacagaacaaatggccagcgccctggaagcgaaaaaagggaaaaagatccgccgtcatgctgcgcatgggaaatggagccggaaagtgggagaagcggtcacaagaaagccttggctgatcattgtgctgagcgtcatcattctcggcgggctcgcttccttcgtaccgaaaatcgcgtatacgcagaacttgatcgagtcgttcccgaaagatatgccgtcacgtgaaggctatgaaatcatcgcagaccatttttcgccgggcgagctggcgcctgtccaggtaatcgcaaatacggaaggaaaaggcgcgaatgtaaaggcagcgcttgaaaaactgccgtttgttgacaccgtaaccgggccgcaatacgggaaaaaaataaacaatatgaatcttacaatgtaagattaaaagataacccgtacagtgaaaaagcaattcaatccaacccggtgatacaaaagcaattgcaaaaggccggcctgtccaaaaaccaaatctggatcggcggcgttacctcttccctttatgatacggcaaaggtgactgaaagggatatgaaggtcattgtcccgtctgtcattttcatcattgccattttgttgctgctgtatttgcggtcactcgttgccatggtttacttgattgtgacagttctgctttcctatgtggcggcattgggcgcaggctggctgctgatccattatgggttgggcatttctgccatccaggaccttattccgctctatgcatttgtatttcttgtcgctcttggggaagactacaatattttcatgatctcgggcatttggaaaaacaaacagcatttgccgcacaggcgcgcgattgcccttggcgtcacagaaacaggtgccgtcattacctcagccgggctgattttagccggaacgtttgcggttttaacggtgctcccgatccaaatattggtccagttcggcattgtaaccgcgattggcgttctgctggatacctttgtcgtccgcccgctgctcgtgccggcgattaccaccgtgctcggccgctatgctttctggccgggaaaattatttgcgaaagcggaacctgtaaaaagtgaagactgatcgcttttatttcgaatgaatgaaagattctctcgttcaaagggtttacaggcgccgcaccattttctaaaatggtaaggaacacctacccgaccgggagaggtattgaacagttgcataagcatgaggttcatagcaaaccctctataaaaaactatggataaatggatcaaaaagccatgtccatacgggatgtggcttttttcatcttattctggcacgggtctgcgcctctcttggaaaaaatgaggggaacatttttgacaggaggtttttttatggctggaagaaaacaagaagaaggattgcaggacttaacgttgctcggcaaccaaaaaacaagatacccggcggattacgatcccggggtattggaggcggttgacaatctgcatgcggaccgtgactattttgtaaaattcaattgtccggaatttacaagtctgtgcccgcttaccggacaaccggattttgcaaccatgtatatttcttatataccggacaaaaaaattgtcgaaagcaaatctctgaaactgtatcttttcagtttccgcaaccatggcgattttcatgaagactgcgtcaatatcatcatggacgatctcatcaagctgcttgatctccgctacattgaagtgtggggaaaatttacgccgcgcgggggtatttccatcgatccgtggtgcaattacgggaagccgggcaccaaatatgaagacatggcccattttcgcctgatgcatcacgatctgtatcctgaaaaagtggataaccggtgagggggatacagatgaatgcatacttaaatggcatgtttgtcgggctgctgattttatcgaatatcatttctgtgaagctgtttcatattggcgatgcgattgtgctgcccgctgccgccatcatttacatttttacgtatccccttgttgatgttacagtggaagtttacgggaaaaaggcgggccgggcaacggtccaggcaggttttctcacccaaatccttgccctggtttttatcgtggccgccatccatctcccggctgccccttcttttcagcaccaagatgcctttaaaacgattttaagcggcagtttccgcgtcgtgttggccagcctgatttcgtattgggtcagccaaaatctcgatgtttttgtatttcataagctgaaaacaaggcacggcagaaaaaaactgtggctgcgcaacaatgcttccacgatgttcagccagttgatcgatacgtctatttttatcgtgattgctttttacggaacggtgccgcctgggatgattggaacgctgattctcacccagtatatttttaaatttgcagcttcgatcatcatgaccccggttgtctatttgcttgtcggcctgatccgcaaaacccggagcgaaaatgggttgcaaaccgtcccggaagcagtggaaaaaggaaacgcataaaactttacacgaacggaagtggcttcttttgtgcccggcctggtcgggtatgaaagaagccgcaactgtttccggcgaaattaacgggttgcgaatgccgatttaccgataaaaaaatcattcccagcaccaaccggaaatgaaatattgcagcataaaaagcagcacatagcaatcttgctaattaccagaatgaggaaaagtcacgacaatcagcgggacaactattgcccagtatgaatatgacgaaaacggactgcggaaccaaacgaacactactatgataagggcaacaatttgtccatgaacgtggtattatagttggaaaatgaggaaacaagtatgctttatataaaattggttaaaaaatcattttagctcaccatttagctccagctgcctacacagaggcagctgaggattatatttggcttaggagagaagcagatcctaacatttttgggaataaggcaggtttgggaactttttcattttaaacttctatttttctttcgaaattcaggattgattcttattcagtccttgatgttgaatcaaatttctataataagcgttggtttggtatagagtctcatgcttgccatctccagtaattttaccattttccaataccaaaatccggtctgtattcatgatggttgataaacgatgggcaattaaaatgacgcccacatgttcagataaatgtttcaaagaatcttgtaataaatattcagattctgaatctaaattggcggttgattcatccattagtataaaatcaggttttcttagaaaagccctggcaattgcaattctttgtttttgcccgcttgatagacgattcccgtactcccctatctcgcttccatatccatcaggaagtgctaatataaaatcatgtgcattggcaagttttgctgcatgaacaatttcttcttccgttactgatgataaaccataagtgatattatcttttaccgtgccgtcaaaaagttgtgaatcctgtggtacataactaaaggactgtctccataatcccggctccacttctctaaaagaaacatgatctaagtacatttctcctgattgcggttcataaaagcgttcaataagattaaagattgttgattttccagccccactttctccgattaatgcaacgatctctcctttattgacatgaaaagagatatcttttaaaacttgctcctcatgataagagaatgtaatatgagacaatattaaggtgttaaatgaatttttattcttaacggaatttgttaagaagtgatcaggttcaacatcctcatttaggatttcaaaaatcctttttagagagccttttgcttcctgataagatgtaaaaaacatattgatatttataaatggggcaatcacttggaataagtaaataataaatgctactaattttccaattgaaatatccccgttgctgacccgcaaggcccctaatccgacaactgaaatgagtaataagaaaccaaatgtacccagaaatggaccaataacagcattaagaatcgaacttttaactcccagtttgtaaagtgaataaaatttatctttcccactttgcaactcttttgtttcggctccaaatgactttactattttaatattcctcaatatttgtgaagagaacattgtaagttcagatattctgtcttgtgatttgtaggcaatctccccaaaacgtttaccaaatggaataataataaaaagggatagcgggacaacaataatgagagcaagcgtcattggaatatctaaaaacaacaaaatgacgatagaaacacagagcgtaaaaaatgaggatattagatcaaccatctcatccgttacaatcgacgctacagtagttgtatcatttgttaatctactcacaagctcttcagatttatttttctggtagtatttcatgggcaattgtaatgttttattccacagtgcttcccgtagattaaatattactttttctgcagatacggaaagtaaaaattgtgaaattgaagataccacactctctaataatgaaaaggcaataatccaaacgatcagtttgatgtctatatttgattttaactgatcaattaatctttcaataagcagagggacagtaagactgatcacacatccctgtgtatggcaaaataaaannnnnnnnnnnnnnnnnnnnnnnnnnnnnnnnnnnnnnnnnnnnnnnnnnnnnnnnnnnnnnnnnnnnnnnnnnnnnnnnnnnnnnnnnnnnnnnnnnnntttctattgcaaaatacacacatcccaaaagggaaagaacagatgctgaaaaaaagagaatcttagatggtttagttgtcttaattatatctacgaacgaaaggctgcttccgttgctattatcattcatatatataaattatctcctttttaaatatgcggatattttagaaataggtcttatattgaaataacagggggcatatcttttttaaagatatctttaaaaaagatatgcaaatgaatctatgatactaatactctagattcatgatataggaatacattgtgtgtatgaagtatcaaaaagataaacttagctatatacatcgttatcattactcgtcactaaccatttagttagtgctaattctatctggaattaacagcataataaagtatggatatcagtaatatttgtaattacttctttttctttttctttctcttacttagatatttcttagcgtcttttccagttcttgtaacatgtttttcataagagatccccttcataccgatttttaagatagtttttacgactattcccattttttatcaccctttaattctaacttagggcttgctgaataagcnnnnnnnnnnnnnnnnnnnnnnnnnnnnnnnnnnnnnnnnnnnnnnnnnnnnnnnnnnnnnnnnnnnnnnnnnnnnnnnnnnnnnnnnnnnnnnnnnnnnctttttctttacggggattgcgtttgataataaagcttgcatggttttctaggagaataatgagattatcccggctgtcatttccggaatcaagcctgaaaagcaatggctgatctgttagtttccgggcagattgaatggtttcctggatgaaatttggtgtacctttttggcagtggacacttccctttcgcatctcaacatgcaggcagtaaccttcctgtcccatgtaagcgaacataggggcataaccgtcacagcctttataggttctttctaccccttcctcctcgtataataagtttaaatccaaagtggatgtcaatttccagttcattctgctgctcattgacaagtgaatataagattttgtattccgggctcgcccggaatacaagttcggacttggacgcttcgcgatgttcccggataatggtcttaggatcgtttgggtcaatgcttcccctccttgtagcctgactactcgaaaagtctgcatccccaggttcttgcttgaacgtctaacccgtaggccgttcctccggatctccgtgctggaaatgagcagttccaggcagcccacggcccggatgagttctcatacgcgaggctgacagatcggcaagccatctggggatatcccgaagcgtccgattccatcgatcccaatacagagaggaggaaatcatatacccttatttgtcggtattgacgtgagctccaaaaacctcgatgcctgcctgatggatggaatgggggaaacgttggccacccaaacggtgacaaacaatcttcccggtgcctctgagttaagagacgccatcctccaacatgcggaggcggatgacaccatccagatcgccatggaggccacatctgtgtatagttggcacccggcaatgtttttccatgaagatcccgagctgaaacagcgtcgtacaaaggtgtttaccctgaatccgaagctggtgagaaatttcaaaaaggcttatgccgagatggacaagaccgatcccaaagatgcctgggtaattgcggaccgcttgcgtttcgggagattgccgaaatccgtgattcagtcagaacaataccttgcctttcaacggttaacacggatgcgctatcacctgattcaaagtttaacccgggaacaacaggtatttttgaatcatctgtttttcaaattcagtgcctttaaccttgaagtggatacaccggtctttggccatgccataacggaatttttgcttgaggcctatagcctcgatgaaattgcccaaatgcctctggaggacttagcgatgtatctccagaccaaaggccatggccgctttagcgaccccgaggatttggccgcatccatccaaaaagctgcccggtcctcttaccggctttctaaatgtgtggaggattcgattgacttggtcctgggcagttccattgagatcatccggcatcttaaacgccaaatcaaggatttggataaggcgattgcccgcgttcttgatggaatcccgaataccctccagaccattccgggaataggcccggtgagctgtgctgggattctcgctgaaatcggcgacattgagcgctttgacgaccaagccgcgatcgcaaaatttgctggattgttctggccccgccaccaatcgggtgattttgaggctgatgacaaaatgcttgcgcgtacaggcaatcgttatctccggtattacctggttgaggctgccaatctggtccggcgacacgaacctgagtaccgcgccttttaccaaaagaaatatcgtgaggtgcataagcactcacacaaacgcgccctcgtcttaacggcaagaaaactggtgcgcctgatcgatgcgctgctccgcaacgatcaaatttatgcgccgaaaaagaaggtgacgcgatgaggtaaccaggtaaccatcatcgatagcctgaacttgaaaacttccagattattccaattatctggaggcttagttcagtattgccatttttacgacatagagccaacaaaatttccaattcacttgtttttaacccttgacatcacaccgtaggactttcatcatccatcaataccatcataacgcaaattgtatgtgaaagggtttgtctattttgcggcagcgggcaaaaatgcaaccgctttaaaaatgtgtattaatatcttttacatatggactaatacagttttgtgcaaaacaagcattttataatttttttcatgcaaaaaccttgttctcatcacatatataggtttaatatataaatgtgaactttttatgaacaaatatagtacagattcattttttactataacagtttgtataccaaatgccgaaaggtgcaagaacagcgaagaaagaagggatcattggccaggtttgccgcaatgcgaataaaggaattaggagattaaaagtcggcatttaggggatattaacgaaaaataaatggaaaagaaggggattgacaaatggcaaaaacgatagcggatttgctgattgattcattattaaatgcaggtgtaaaaagaatttatgggatcgtcggggactctttaaatgcagtgctcgactccatccggcgctcagggcggattgaatgggtcggcgtgcgccatgaagaagtggccgcttttgcagccggcgcagaggctaccttaaataacagcattgcggtttgcgcaggcagcagcggccctggaaacttgcacctcattaacgggctgtatgactgcaaccggtcgcgtgtgccggtattggcaattgccgcccatattccgagcagtgaaatcggaagcgaatatttccaacaaacacggcctgaattgattttcaaagactgtgcgcattttattgaaacagtacaacgcccggaacaaatgcctttaatggtaaatatggcgatgcaacaggcggtcgcaaaccaaggcgtttccgttcttgttttgcctggcgatgttgcaggcctggatgacaacgtagcagtgccgcaagtgccggtccacgttgccaaaccggtcgtgaaaccgtcggaagaagatttaacacagcttgcttcttacttaaacgaagggaaaaaagtgacgctgctttgcggtgcgggttgccagggtgcccatgacgaaattatggaactgtgcaataaactgaaatcgccaatggttgtcgcgctgcgcggcaaagaatttttggaatacgataatccttactttgccgggctgacaggtttgatcgggtattcttccggctatgacgccatgatggaatgcgatacgctgctgatgctcggcacagacttcccgtaccgccaattctatccgaaaaacgcaaaagtgttgcaggtcgacatccgttccgaacatctgggacgccggacaccgctgacactcggcgttgtcggggatgtaaaagatacggttgaagctttactgccaatgattcaggaaaaagacaacagcaagcatcttgaaaaacatgtcaaagcttatcaaaaagtaagagaagatcttgataaattggctgttggcaaaccgggacgcaaaccgatccacccgcaatatttgacaaaactggtcagtgatttggcggatgaagatgccatcttcacttgcgatgtcggtacaccgacattgtgggcggcgcgttacgtgcaaatgaacggaaaacggcgcctgctcggttcattcaaccacggtacgatggccaatgcgcttccacaagcgatcggcgcggctgttgcacaacctggcaaacaaattatttcactcagcggggacggcggcctgtccatgctgatgggtgacatgttaacgctccgccaacataaactgccagttaaagtcgttgtctttaacaacacggcattaagctttgttgaactggaaatgaaagcagccggctatccggaaaccggaacaggccttgacagcccgaactatgcagccattgccgaagcgatgggcatgaaggggatccgtgtggaagacccggctgatctggaaggggcactccgtgaatcatttgaacatgacggcccggccgtgattgatgttgccgtaaaccgccaggaattgtccctgccgcctaaaattacgtatgaacaagcacacggctttacgctgtggatgctgaaagccgtattaaacggccgtgccaatgaattaattgatttggctaaaacgaacttgatccgataatcaaagaaaaagcccggtatccgtcatgggaaaccgggctttttcttataaataagggttttttcgtatttttgaatggtgcttgtggccgccgaaaagctgccggaaaagcgggcccggcaaatggtatgcaggtttccgcgcaccgcccaatattacagaaggggcgccccatctgccagtttcaggcttttggtgcgcccctttttagttattcgttttccaaatggagcaaattcagcagtttaaagaacaggcttgcgataatggcgacaactgttgcaagccccatcccgcttaatgaggcggtgccgatattgatcgttgcgccgcttaagccgacagcgagcacaaggcaggtcagaatcaaattttgtgattttccgtaatccactttttgttcgaccagcatccgcaggccgcttgccgcaatgacgccgaacaagagtagagagatgccgcccataaccggctgcggaatcgatgaaatgagcgccgccaattttccgcagaaggaaaggataatggcgaggaccgcagcgccgccgatcacccatgttgagtagacacgcgtaattgcgagcacaccgatattttcgccgtacgtcgtatttggcgtggcaccgacaaaactggatataattgtggaaattccgtttccgagcaaagaccggtcaagcccgggatccttggttaaatcttttttgacaatattgcctgtaacgattaagtggccgatatgttccggaatgatgacgagcgctgccggcgcaatcatcatgatgtcggaccagttcagtttgattggatagtacgttggcaatgaaatccaggctgcctcctggacgggtttgaggtcgacaatcccgaatgccagggaaatcaagtagccgcaaatgatcccgattaagatcggaatgattttaagaaagccgcgcagggtgacccagcagactactgtaatggcaagtgttaataaggaaaccgtgatggtctgcgggtccgggctccagtgtttcacggaagcacccgactggacaaggcctgccatctgggccgcggtcgggacaagctggagcccgataacggctacgatcgcgcccattgcagcaggcggaaagacaacctcaatccagcccgtgccggcaattttaacgataagcgcaatgatgacaagaataatgccgactgcaaggaatccgcccaatgcgtaactgtatccggtaaggcccgcatgttttgcaagaacggcaaataccggcgagatgaaagcaaagctggacccgagataagccgggatttttccttttgttatcaggatataaagcagcgtcccgatcccgttcatgaataaaatggtcgcaggatcgactttaaacaggacaggaacgagaacggtcgaaccgaacatggcaaacaaatgctgaaaacttagcggcaggcttttgagaaatggcagtttttggttgacttgaatttcatgctgttccatatttctccccctcaatggattggtaaaatgcgaggcaggggttttccaggaagtgcccttttggtaaaaagaaagcaccttgcccgaatgaaagcaaggtgcatggaagtgcacatttatccggaaccttgccagcctcacgggactgttttaaaggcattcatcatcttttgtccctgctattatggcagttccggccgggtttgtcaattcctattttgcaattcccggcttttgggccgcgggatatggcaagtttatcgccatcgccccggcctttttatgggcctggtgaaaaatggagccatcatgcaaattctcaagttaacctttcttgcaataacaccgccttttaaaaggcagatgttttacttcccgtcctcctcgaaactgatgcgaaggccttttattttctcaaccgatcaatttcatactggtcatcggtcaatatataggcaatttgttcatgtgcaatgctcagcagccatggattctccgatttgtaaaaagaaagatcctcaggaagcatcggctgttcccatccaaacagggatttagaaaactttagaattttatccttggacagttcatttgcaaaataataatatagtccctgcccattgtatttcccctgattaagtgatcttttctcttgacttccggcttaaaatgaataaaataattagagtaccgaaagtttaccctctctaaataatcgaaacgctttctttctcccgctcgagtggcgggagttttcctcaaaacttctgccaaacgaaaaaccatctgcatttccggcataattccggtatacaacgtttacactaaaatcatgaatgggggattggaatggaaacaatgaatgtaaaaaatagttctatcaggattgtccctttttttgcggtgatgatggccggcgcactggtggcatttttaaaccagacgctgattaatgttgccctcccgcaaattatgaatcatttacacatttctgcttctacggcaaactggctttctacgatctacatgctcacaaatgggattgtcattccggtcacggcgtaccttatgagccgctttacaacaaggcagctgtttttgttctcgattgggctgtttgcggccgggacgctgatttgtgcagtcgcacccgggttttctgtgctgctcattggccgggtggtccaggcggccggcgcggggattatttttccgctgatgactaacgttattttcgtgctgtttccgcctgaccggcgcggttttgcgatggggattttcggcgtcgcaatgaactttgcaccggcaatcggcccgacgctttccgggtggattgtggaaaaccattcgtggcggacgctgtttttcatcattttgccgatcgcaatcattgacttgattttcgcttttgtttttgtaaaaaatgtgacggaaacgagccggccgaaactcgataaaatcggtgtcattttgtcttcgctcggtttcggcggtattttatacggattttcaaccggcggcacgaaaggctgggacagtgtggaagtaatgacgacgctggcagtcggggtgattgctttcggcttgtttgtctggcgccagtgggtcatagaccatccgattttggaattccgcattttccgttatccggtgtttacgctaacaatggcgattaatattattgtgacgatggcattgttttcgggcatgattttaatgccgatttatatgcaaaacgtgcgcggtttctcgccgcttatgtccgggctgatgcttttgccgggcggcatcatcatggggattatgtcgccgattacagggcggctgtttgaccgttacggtgcaaaatggcttgctttaatcgggattgccattaccattgtgaccacttttgcattgacccgcctgaaattggatacatcttttacttatgtagtcaccatttatacgatccgcagtttcgggatttctattttgatgatgccgatctttacggccgggttgaatgacctgccgctggccatgaataaatacggcactgcgatggtgaacaccttcaggatggtggcaggcgctgtcgggacggccttttttgtctcggtcatgacgaataaagggattgcgcatacgaaggaaattatggtctctggacaaatttcccctgcggataaaattcatgcggcgcttgctgcaaggcagggaacggtgatggggatcaatgatgcctttatggtcgccacctatctggccgtaattgcttttatccttgctttctttatccggaaaaccatcccgcgcgacagccttccggaaaaaacagcccggcaggtaaaacctgtaacggaatcataagaaatgccggatactgaaatgaaaaatacttaaatgcaaaacctgttaaaaaggcggagagacatagttataaccagtgtctccacgcctttttgcattatttcatcttcatggacgaaacggttgaaaaaggctttgagttttgcggcacagatgatatgatttactgcaaagatgccctcctttccggttggtggttcttcttaaacgcaataatgccaggggttcggggcggctttttataatgcacggtttaatttttttcgggggggtgtctgtataaacagaaagaagatttttgtccttgccattgtgggttgtatcatcgtgatggttgcatatgtcaatatatcaaaatatatggaaaacaaagcgtttgcgcgcaattatccggactgggcaggcagcagtgccgatcaggattggtatgcaaagatgtcggcttcagagccccataaagaatacgaaggcattttgtattggaagggcagcaaagaagaggccggccggataacggttaaaaaagtggtttacagccgggaccgtgcgagccaggtcaccgttgccaatgaaaaaaaataaacacggaaattattcctttattgacatggaagaacgcccttccgaaaaaagccatatttccattcaagtggtttggagtgtggatggaaaagaacatacggataagattgtgctgcaaaaaagcgctgattgatcgttttggccataaaaaacagggcggcatttccgctgttttaactaaaaaaaccgccgggagaagaaagattcccagcggttttttcatgcccgggctgttgtttaatcccggcaggcagttgtttacgctcttgcttcaaaccgttttgcaatttcgacaatgacctggacggctttttccattgtttccactgaaacgtattcgtatttgccgtgcatgttttccccgccggcaaaaatgtttggcgtcggcagccccatgtaagacagctgtgacccgtccgtgccgccgcggacaggagagatgaccggctcaatgccaaggctcttcatggcgtcatgcgcaatatcgacaatttcctttaccggttcaattttttctttcatgttgtaatattggtcagccaattccagtgtaatgttatcttcgccgtatttttcttttaagcggttgacaatcgactggaggtttgccttttttgcctcgaatttttcgcggtcatggtcgcggataatgtagtacagttttgtttgctcgacatctccgtggatggacaggagatgataaaatccttcataaccttccgtccgttccggcacttcatcctcgggcaggaggttgtgcagttccatcgcaatttttgccgaatggaccattttcccctttgcgctcccagggtggatattattgccgcggactgtaattttagcggaagcggcgttaaacgtttcatattcgagttcaccgagcgggccgccatccatcgtataggcaaaatcggcaccgaacgttttcacatcaaatttatgcggccctctgccgatctcttcatccggggtaaaggcgaccctaattttgccgtgtttgatttcagggtgcttcagcaaatagtccatggccgtcataatctccgccacgccggctttgtcatcggcgccgagcagcgtcgtgccgtccgttgtaatcaaagtctggccgatataattttttaagttcgggtattcatccggagataggacaaccccttgctctttgttcaaaacgatggccttcccgtcatagttttcgataatctgcgggttgacgttttttcccgtaaaatctgtcgccgtgtcgacatgtgccaaaaatccgatgaccgggacttctttatctgtattgccaggcaaagtggcaaaaagatagccgttttcatccagatggacttcctccatgccgatcgattccagctcatcgcgaagcatgcgaaggagtgtccattgcccgtctgtggaagggcaatggacactctcttcgttagactgtgtgtcgaccttaacgtatgtagtaaatcttttcattaacgcttctttcattatcttcactcctcattttcggtatgtctatattttaccaaacccggcccaaaagcttgtatttattcgcaatatttttggtaaaacgttccgagcgcatatttgtagttgggatgccatggtttgtcttttccgcaataatggataaatacggtgtgctttttaatccactctatgtcctgttttttaataaatgcggcacgttcaaaaaaacgggcgtcatagttataccggtagctttcggcaggttttattttgttccagaacagggcattgaatacgtcctggtcgggcaggagcagcttcagtttattttcctcaatgaattgaaagatttcctccactttcacatgttgccggatcaattccaaattcataaggaggacgccggtgttaaaatacccttttgcattcggggtccgtaggcgcagtttattgatcaggcgggccttttttgccgagtgctcatgttcggatgcaataaaaaaatgcccttcaaaatctgagtaataaaatgcggcggcggggttgatacagacgatatcgggatcgagataaagaatcctgtcaagatgctccggcaaaaacaagtgggcagtaagccggtagtacatttctgaagtgtaatgcctgaggatcggcgcatctttaaacagatccggcggaatccgcaccgggaaaaaatggtgccctttctcttcaatatagtgatgcagcccggaaagtttttcttcagaaatggtggaatgcagcaggtagatcgaaaactcttcttcgggattgttttggataagagagtttattaacactttcaggggagggaggtaattttcatttaacgtaacaaggatattcatggcttttccaccttttggctgtagtttcaactacttccatgatacaggtttccttttccgcaaacaaactttttgggttccggaaagatgagccttttttcaccgtacaatcctggctgcccgcttgcagggaaacggtgcatgatgcctgtagaaaccgtgcaccctccggcgtttccacagaaaaaaagcctgccattaaaatggtcaggctctgagaagcgacagtctttcccaaggctttgaaagccagcgccgggtggcaaagatgccccggaaccattcgtcaatgccctgggcaatccaaatgccgagcagcccaagcccgaaatgcaccccaaggacatagcttaaaccggctgcaaatacccacatggaaaaaatgccaatcatgaccgggaagcggacatcgcctgctgatttcagggaactcatcagcacgatattcatggcccgccccggttctgtaaaaacaatggcccaaagaatcgggatgctgacggcgagaatgtcttcgcttttcgtaaacacgtgcaaaacaggcgagccgatgagcgcaatcacaagcgaagtaaaaaaagaagccatcattgcaatctttaaagttttcatcccgcgcttcagggcgcgttcatacgttttcgcaccgacataccgggcgacaagcagctgggtgccggatgcaatggcaagggtaaacagataacagatcatcgaaatattatttaaataaacgcgcgcagccagggatgcttccccgagtacggcgataaacccggtaatcaccagctgggaaaactggtaggaaaaattttcgccggccgagggaattccgatctcaagcaatgcacggatatcttctttctttatagaaatgatatcacggatgcccattttcaacgcgagcctgcggtagacaaggaaaagaagcgccgataccgcaaaaacgcgggcaaccacaatggcccacgataccccgatgacgcctgtaaccgggagcccgaaaatgcccgtaatggccaaaatgttcccgaagatgctgattaaatccattataacggtgacaagcatcgactcttttgtataaccgtggctcctcagcactgcgcttaaagcaagggagatggactcgagaaacagggaagccccgcaaattttgacaaatgtcagcgcgtattgataaacccttccgtgaatgtcgaaaaacccgaggagcagttgcccaaacagaaaaacaaaaagcccgacggcaaggccgaaccaaaaattcagcccgaaagcggaatgggcgacctggcgcgcctctttcattttcccggcgccaagattctgcccgatcaggataattgcgccgacggatgtgacattaaaaatgagaataaacatattcaacagctggttggccacgcccaccccggcagccgcatcatcggcgtagtgaccgagcataagggttgcgatgatcccgatccccatatgcaaagaaagctcaataaagagcggccaagaaatctgaaacagggtctggtctttgtaatattgctgttgtgttgtcaacaatttccccccttttatatgatacccccagccttttataccggttttgttgccaggcctggtggatgttcattcttcaatactatgaaacattgtagcctttattgccgtactgtcaattggaattttggaaaaacccgtgaattttttatggagggcggatattggtcgtgtttgcgtatttgtttgcatgttttcaaatctgtttacatgtttacacaagcgcaaacacttgtatacaaaaatgcaaacttgtttgcaaagctgtaaacatggctttatgacaacatttttcaaaagtttacaagccgcaaacaagtttacattttcgttaaaaaagttcagagtattgattatttttatagactcagatattcttagagtaagccaaagaaagcgatacagggaggaaaaatgaatgggaaagacgcggattgccgcagtcgatgtaggcaatgattctttaaaaggcatttttggaaaaatggagtatgagctcaatatcccgaacgtcatcgcgcgggatatagaagaccggccggtaatcggcattgaggaactggacagcaaagatccgcttgaaggcatccatgtaaaagtccactcccctgctttaaaggaaaataacgtgatttaccgtgtcggggagctcgcaaccaaaagtgataatgcaaccgaactggaccctgggagtagcaaatcggaagaggaccagaccctcgtcctgctttttacaagccttgcgcttgacgcagtaagggaagaaaacgccaaagtttttacccgcaaccagaatgtgattgatgccaattacacacttgggacaggcctgccgctccgcgaagtaaaagaggggaaagatgcgggctaccggtcgcagttgcttggatccgtccaccaggtggaatttcttgtcacgccgaaataccagggattgaaagtcaacctgaaatttgacgaaatcaaagtgtatccggaaggctttgccgcttttatcaatctcgtcatggataacgatttaaacatcattaaccgcgatttgattgacaaacgcattttgatccaggatatcggcggcctctcaacggatatcgccgtgatcaaaaacaggacagtcgatgatgaccgggcgcagggctttaatctcggcgtatcagaagcgcttgaacagatccgtgaagaaatccgcgtcaaatacggggtcgaactggacagccgccgcgatgtggtcgatattatcacgaaaaaacatgaccgcaaccatattatggtgaaaggcagccggacaagcgtgcacgacattacagaccgcatcctgtttgaccttgcgaagaaacaataccgtctgctccggaacgtttggcagaaaaactcgcaaacagagatttgctattttgtcggcggcggctctgttgtcctgaaagattacttaaaaacgctgaacaacagccttgatggctacaatatcgatttctttgaagatgaaaaagagagcatctggatgatggccaatgcttactacaaattaatttcggattatgtgaggaaaaacaataaaccggaagacaaaggaaagaaaccggtcgaatccaaataaggtgaaaaaatatggaaaatcaaagcgggatgaagcggggccagacgattgcgttccggatcccccaggatacgcccgatcatattttaaaagagctgtcaaagttaaaagaaaaagagaaacggaacttctccgccaaaatagccgggtatgtgatacagggcgtgaaccagtcgctcgtaaaagacaaagaaacgattacaattccgctgccgcgcaaactgacaaaagtgcagcatgactggctgaagcatgaacattcggaagcaatgctcggcagcattgtttacgagctgattcaggatccgctccgggcgacttcgctttttgctgccctctcgaaacaacctgtttctatggatgatacgctttttttacaggaagacgaattgccgcaaaccagtggagaagcagacccggaaccggttcaatccggtggtgagccgcccggttcggatgatcttgatgcgttcgactggagaactgccgccgccgaaccggcaccccctgaagcggaagcgccggaaaaagaagaagatgcggaagacctgctcggggattttctcgccagcatgaataaatgaagggcgcagggtgaacccctgtgcgcctgaaaacttgtacgaaatgtaaggggatggaacagatggaaaatataatcgaagttgctggtgtgagcctggtgcgcgacggcaaaaaactgctctcggacattcactggacggtcaaaaaaggggagcactgggctgtcctcggcttaaacggttccggcaaaaccactttgctcaatatgatcaacgggtatatctggccgacaaagggcagcatcaaggtgctcggcaaagcgttcggaaaaacaagcctgccggaactgcggaaatcaatcggctgggtcagctcctccgtccaggaaaggataccgcgcacccagcttgcacgcgatgtggtcatcagcggcaaatatgcatcgatcgggctgtatgaagcggtggatgcagaagacgaagaaaaagccttgcgcttgatggaacaattgcattgtgccgccctttatggccgtgcttatggacattgttcgcaaggagagcggcagaagcttttaatcgcgcgcgcgttaatggcggaaccgcgcatcttaattttggacgagccttgcaacgggctggatttatttgcccgggaaattttgctggaaagtgtggaagagctggcaaaagatgagaacggcccggcgcttgtatatgtgacgcaccatccggaagaaatttcccccgctttccaaaagacattgctgatcaggaacggggaagttttccggcagggccgcacgtccgagatgattgaaaaacaagtgctttcccgcttttttgagcatgaaattcaggtggagtggcgcggaaaccgggctttgtttcaagttgtctgatgattggaaaacaaaaaaatataaaataatgaattgacaaatcccgagccgtccactaatatttaaatataacaaatgaataacttatccagagagactgagggacaggcccgatgacgtccagcaaccttcaaatctttttttgaaaggtgctaattcctgcagaatggttcattctgagagataagtcacttgaccggcaaacctctttcgaatgaaagcgggtttttttttgctaaaaggaacagaaggagatttcaacatgctggtattagaagatattcataaagtatacggcaaagggaaggacaaaaaggttgaagcgttaaaaggcatcaatctgcgtgttgaaaaaggggaaattttcggggtggtcggctacagcggcgccgggaaaagcacgctgatccggtgcgtaaatctgctcgaacggccgacttccgggaaagtgctcgttaacggggtcgaccttgtgcgcctgccgccgaaagagctgcgcaaagagcggaaaaaaatcggcatgattttccagcagttcaatctgctccagtctaagacgatttttcaaaatgtggccatgccgcttgtgctggaacaccggccgaaggaagagattaaggcaaaagtcgcagagttattgtcttttgtcgggctggaagacagaatgcaccactatcctggccagttgtcaggcggccagaaacaaagggtcgggattgcaagggccctggcgacggatcccgacatcctgctttgtgacgaggcaacatcggcccttgacccgaatacgaccgaagccgtgctcgacctcttgcggaaagtccgggatgagctgggcatcacgatcctgatgatcacccatgaaatgaacgtcattcgtgacatttgtgataaagtggcggtactggacggcggaaaaattgtagagcagggcccggtgctcgaccttttcacagaaccgaaaacgcaaattgcaagaagctttgtgaaaaccgtgctgaatgattcgattccgccgtcggtgcaaaaactgatcgatgaaagcagcaaagacaatccgcacggcatttaccggatcctgtttaaaggagcttccaccaatatgccgctgttatccaatacggcaaaacatttttcaatcgacctgaatgtgcttcatggcatgatcaccgaacttcagggcattcctttcggcaacctgcttgtcgaattgaaaggcgacccggaagaaatgaagcgggccattcagtacattaacgatcacgaagccatcattcgggaggtggagaaaaatggcatttgattggtcatggttttggccgcaatttttcacggcaatgggccagacgctgtatatggtggctgtatcattaatcatttccatcatcatcggcgttccggtcggcgtgatcctcgttattacccgggaaaacggcatttgggaaaacaaatggatttttaatattttaaatgtgattatcaatattttccggtcgatcccgtttattattctcgttgtcgcgatcattccgtttacgcgctgggttgtcgggacagcgatcggaacaacggcagcgattgtgccgctcgttttgtacactgctttttacatcgggcggctcattgaaagttcactgcttgaagtcgacaaagggacaatcgaacttgcgcagtcaatgggggcgacgaactggcagattatttggcggtttttgcttccggaggcaaaggcgtccatggtgctcaatttaacgattgccaccatcgggctgatcggggcttccgcgatggcgggcgcggtcggtgccggtgggatcggggatttggcgatcacgtacggctacaaccagtttcagacaggcgtcatgatcgttaccgttatcacgctggttattttcacccagcttgtccagacattgggcaactttctttccaaaaaaatccggagaaaataatattggaaaaaagggttacacctttttataaaaaatgaaatgcagggggacttagagcgatgaaaaaatttgcgattctattattggggctgatcctggttttggcaggatgcggggccaaaaacaattcgggcagcacaagcacaaagacaatcaaagtcgggacaaccacttctgaagtgccgacatggaatttaatccagaaacttgcgaaaaagaaaaatatcaatatcaagattgtccgctttgacgactatgttcagccgaacctcgcattaagcgacggggaaattgatattaacgcattccagacggttgtttatttcgatgactttataaaacaacgcaatctgaagctatcggcgatcggcacaacgaatatctggccgatggggatctactcgaaaaggtataaaaagatcagcgaagtaaaagacggcgaccaggttgtgattccgaaagacccgacgaacctcggaagggctttgcttttgctgcaaaaagccggcttgattacgacgaaaaaaggtttcacaggcaaaggcgggcttgaaaatgtcgcttcaaacccgaaacatttgaaaattactgccgtggatgccgcccaaacaccgcgcggcctggatgattcggcactcgctgtgatcaattgcgatatggccattaatgctggcttaaacccgacgaatgactccatcttccgtgaagatgcgggcaacaaagcgtatatcaatattatcgcagcccggacaaaagacaagaatgacaaaacgctgaaagaaattgtaaacatttatcattcaaaagaagtctccgactttatcaaaaagcattataaaggcgcagccgtcccggtcaataaaccggtatcgtatttaaaagactataagcaaacacaatgacggcaaaaagtttcacagcagccccctaaaaacagcgggctttcagacaggcggtttatccgccccatggcagaaagaacggcaggatacggttagaccggtatcccgccgttttttaattgattttgggttttggaccgttgctttttttactttcctaaaaccggggaagtcatctataatggaagaaagggttttcaatacggacgggtggaaaaacaaaggggggattgctaactgctgaaaataagttatagaagttgcaaaagttattgactttcaaatcttatcagaatatatttacctataaggcaggcgagccaagtggaatattattctagattcgccctcttatccttggatatttgcattttgccggaaaaccgcttttacagcgtgcataacttataaaatataagcgttgagaatgacaaaaaaggaggctttccccaaatgaatgcgattacaattgtaatcggctccatctgtatcttaatgattgcttatcgtttatatggtacgtttatggccgtaaaggtgttaaagctgaacaatgatacgccgacgccggcacatgagtttaacgacgggaaagattatgtgccgaccaataaatgggtgacgttcggccaccattttgcggcgattgcggctgcaggcccgcttgtcggacccattttggcagcgcagttcggctatttgccgggcctcttatggctcttgatcggcgctgttatcggcggggccgtacacgatgctgtcgtgctctttgcctccatgcgccggaaagggaaatcgctttctgaagtggcgaaagaggaaatggggccggttgccgggttctgtacaggccttgccatgctgtttattattgtgattacgatggccggcctttccatggttgtcgtaaatgccctgcaaagtaacccatggggcaccttttccgtggggatcacgatcccggttgcaatgggcgttggcttgttttacaaaaaaaccggcaatttgaagctgaccacaacgatcggtttcctcctgatcgtagcgggcgtttttgccggtccgtggatccgccatacggtaattggcgaatggcttacgtttgatccgaaaacattggccattattcttccggcttatgcattttttgccgcggccctgccggtatggctgctgttggcgccgcgtgattatttgagcagctttatgaaaatcggcgtatttattgccctcattattggtatatttatcattaatccgccgattcatatgccggcgctgtcgcaatttatccacggcggcggcccgacgatgacaggaccggtctggccgtttatttcgatcacgattgcctgcggtgcgatttccggtttccatgcctttatcggctccggcacaacgccgaaaatgctcgataaatggacggatatcaagccggttgcatttggcgccatgcttgtcgaatcgcttgtcggcgtgatggcgcttgtcgctgcgaccgccctgcagcccgccgattactttgccatcaactccacgccggaagtctttaagacgctcggcatgcatgttgtcaatcttccgcatttaagcagtgaaatcgggatggacctggccggcagaaccgggggtgcggtaacgcttgcagtcggcatgacgtatatttttacaaaaatccactggtttagcaatcttgcaccctatttctatcaatttgtcattttgtttgaagccgtgtttatcctgacggcgatcgattcggggacacgggtcgcgcgctacctgctgcaagactttttaggggaattgtataaaccgctcaaaaagaccgactggctgccgggatccattctcacaagcgccgcggcctgcttcatgtggggctatttgctttactccggcgatatcggttcagtctgggcgctgttcggcgtatcgaaccagctgatggcctcgatcgggctgattgtcggggcaaccgtcattttgaaaattgccgataaaaaacggtatatgttcacttgcctgattccgcttgcgtatttgtatgttacggtgaactatgccggctattggatggtgaaaaatgtttacctgaaccatgccgcgccgggctacaatgtactgaacggcattttgtcgatcattatgctcattctcgggctcgtcattatgatatccgctttcaagaactggtacagcctgctgagaacgcctgccctgccggatttggaggcatcggcaaggaaggcttgatgcaaaacttgccgaatccgctttaaaggaaaaactttgcatgcaccagctggtttaatgcacaggcattcttggggggggatatcagataaaagcggcgggacacgatttaccgtggccccgccgcttttatcatgtatgcagcctgttttacagggggagtctaaagttgtatctgctattggttcggaaagcgcttcactcaaaaaattttaaaaatttcataaagcctctggtcttttctccgtaaagttgttataatagatcgaaaataataatttcacgtattagaaagggatgctatcggtttgaatcaggttatcgaattagtgaaagcagatgtgaaaaaggaaaaaccggctgttgaatcattgggttttggcaaacatttcacggactatatgtttgtcatggactataatgacgaagaaggctggcaccaaccacgaataacaccgtacgcaccgcttgtattggatccggcagcaatggtattccattacagccagtctgtattcgaaggattaaaagcctatcgcgcaaaggacggcagggttctgttgttcaggcctgaaaaaaatgttgcccggatgaatgtgtcttgcgcgaggttaagcatcccgcaaatagacgagaccattgtgcttgatgccattaagcagcttgttgagcttgaaaaggactggattccggacggggaagggacatcgctttacatccgcccgttcattattgcaacggagcctagccttggcgtacacccggcacacgaatataaattcatgattatcctttctcctgttggttcgtattacggcgaccagctgaaacctgtccgcatttatgtggaagacgaatatgtccgggctgtcccgggcggcgtcggctttacaaaaacaggcggcaattatgcagcaagtttgaaagcacaggaaaaagcagaggagtcgggctacgaccaggtgctctggctggacggtgtggaaagaaaatatattgaagaagtcggcagcatgaacatcttctttaaaatcaacggagaagtcgtcactccgaaactgaacggcagcattctcggcggtgtcacaagagactccgttatcgcgctgctgaagtactggaatgtccctgtaaaggaaacgaaaatttccattgatgaaatttatgacgcttataaaaaagggcatctggaagaagtgttcggcacaggaacggcagctgtgatttcccctgttggcgaactcggctggaaggatattgcgatgaagcttccaaatactgaaacgccggattcggttgcaaaccggctttatgatgctttaaccggcatccagctcggaaaaacggaagatccgctcaattggaccgtcgaaattaaataattttgacattgaagacggcgcgtttagccagtttttcaataaaaagccggccctgaaaaatggagccggctattttaatggccggcaaactgtggttaaataattgcaggtgaatcgatagggagaaatgagcatgtatcagaatgaagcccagcaggtcatgagggtttgcttattagccggaaaaatcatgctgatgagcggcgcggaaacgtaccgtgtggaagatacgatgtcaagaattgctgcagcggcaggaatcaatggatcgcacagctttgtcaccccaacagctattattttttcactggacggggcggaactgacaaagttgatccgcatctccgaacgttcaacggatttgagaaaagtcgaccaggtcaacagcatctcgcggcaaatcagcaaccggggcatcaccctcgaggaagcgtatggacagttgaaaaaaattgaaacggaagaggaagcttaccctctctcgctgcaatttgtggctgcggcgatttcaagtggctgttttgtcatcatttttttaggcggctggattgattttctgcctgcgtgtattgcaggcggccttggctttctcagcacgcattccatccaccggttcgtaaaggtgcgtttctttgctgaatttgtcgcttcgcttgtgatcgggatcacggcttacatccttgtccatgcaggcatcggccgggaactggataaaatcattatcggttctgtcatgccgcttgttccggggctggcgattaccaacgcattgcgcgacctgatggcggggcatcttttttccggtgtcacaaaaggcgcagaagcttttttaacctcatttgccatcggtgccggcatcgcgattatccttacgattttttaaagatgcctgcgcttttacacatctccatgattacagtttttcaaaagggtgacggaagttgttccagcagttattaaccagttttttttcttcggcgggatttggcattcttttcaatgcaccgagaaaattgttgatccagtgtgggattaccggcatgatcggctggggcatttattttctattttacttgtatgagcagaacgtcgtgtatggcacgtttattgctgcttttttcgtcgggataatcagccaggtgtttgcccgtttttataagacgccgatcttgatttttacggtcggcgggattattccgcttgtaccgggcggccttgcctatgaagccatgcggcacttcgtccaaaacgattataacggcgccgtatcgcttgccgcaaaagtgctgcttctctctgttgcaattgcgatcggcctggtggcttctgaagtgacgaaccagtttatcaaaaaactgccggataaacggccaaaaagaatgaagtagccttaagccgggtttgcttgagagcccggctgtactatataagtcgaactaaacattcctatttctttacgtgttgccagaagcagtctatccttgtttattgcaaaattaaagtgcagagatgtgcaaaatttctatgcaaatggttatgcagaggggctttacatggaggggtagccatgataacctgtttgggtttgccaaatctgttacagctggccgcttggcaaaagaatcatggctgcagaggctccatgtcaagcccttaatagcgagaattcagattgaatttttatgcggtataaacgaatttatatactgcaatactctgcacttttttcttgcaaaaaacatatcctgatcgtaatgattttgacgcgaaaaacaaaagtgcattttaaatagtagcagaggaactgacacattttgtatattgataaagctgtattcggcttctataattagggcttgctaaacgaaaccagttttgactttatcagcaaactttgcctcaatatataggagaattgattcacccttctctattcgttgaatcaactttcgagtgcaagctttttcctggattttttaaaaaatttgcatttggtataggtagaaaagcgatggtgtttgtaagtagtaacccccttgccgatggtgaagcaatacaggcaacaaggacatcaattccgcaacagattggataaacaatctttaaagccatagggaaactcttttcacggaattatagggatagacagcattgactgattgcccagcgataaatgagtaatgtttatacaaagataagtctgcgtgtccgctgccacacttatttgtgcttggaaaggcaatctacacatataaacacggtcacttcatcacctcgacgtgatttttagttaactgttacccctctgactttagaataataaaaatgacgctcaaggcaacatttatttcattgcgttttgtaccttgggtaaagcgaaaggaatgagtataaacttgaacaaaaacatttacatcatcaggcattgtgaagcggaaggccaatcggaagacgcgccattaacggtaaaaggactggaacaagcagaaaaattatctgattttttttataataaaaaagtggatcacatcatatcaagtccgtttttacgggcaatccaaaccattcagccgcttgcaaacaggttaaatttggaaattcaaatagataatcgtctatcagaatgcctcctatcctcaatgccaatgtctgattggttggataaacttcatgcaacatttgacaatttagatctaaagtattccgggggtgaatccagtaaagaagccatggatcgaattgtaaatgtagttatagattcattggaaagtgaacatgagagtaccgtgatcgttacccacggaaacattatgtcactcttacttcatcactttgatatgttttttgcaagaaaaaagtgcagagtattgcagtatataaattcttttataccgcataaaaattcaatctgaattctcgctattaagggcttgacatggagcctctgcagccatgattcttttgccaagcggccagctgtaacagatttggcaaacccaaacaggttatcatggctacccctccatgtaaagcccctctgcataaccatttgcatagaaattttgcacatctctgcactttaattttgcaataaacatactatccaatacatgaactttcctgagaatatccgtatgcacatacggagtactaattccctcgagcggcttaaccaagaagttcgtagaagggaaagggtcattcgcatttttcctaatacccaatctgcttttcgtttggttggtgccgttttaatgcagtatcaagatacagaatactcgaagaggaagtcacttatgggaaagaatagttagcagcattttcagcttaacttccatcatggatgatttcatctccgggaagggatgtcaaattgaaaggcatttgacatcccttcccggagatgaagaaaaaaacccatggaagttaagccgaaaaaatgaaggggtggttgaaaacatttgcccataaatttacacaataacctggacttgactcgggagcttccccttttgtccttcatgcgtgttatgaagaacatttgggacgccggcgattctccttttgtccttcatccgtgttatgaaggacatttgggacgccggcgattctccttttgtccttcatccctgttataaggacatttggcttggcggagcttttccgtgtgtccttcattcccgtagtgaaagatattttccgcagcgggattcttctctttgtccttcgcccctattgtgaaagacaggttgcatggcgggatcctcatcgccattgtgaaagacaatgctggtttcctccacaaattctatacaaaatgaaagctccagtacagaagacatattactataataactccgaaaataagagcgccaatataaggaatcatttttaactttccaggctcttttctaataaaagaaacaatacttgctaagaagctaataccccaagcaaaccaaccccaatggtgaaaacgagtataatattttatatcttggcctgttaaaaataaggtaatagcaattataaaaagaataagcccaaggataaacataaaaaaggaaactttactaaaaattttgttttccctattcatcttttcttcaccctccccgcaaaattgatgctttgttacctgctgtacacagtaatcataaaataaaaattggtgctttgtcttgatggaacaagttaagtttataccattcaaataatgtttctaagaatatggatttttactttacgtgattgcttttttttcgagatattttccccgactggtatagagttatgctgcttcatttggtgttgttgatagctgatcttgctgcttcaaatcataaaggtatgcagatggggttgggaagctttctgatcaaataacagaacaacattggaaccttcacaatatgtgattcgcgaaaacgcaagcctgtagctcttaatttaaaatttgaaaacggtaacaaaaataagatgaaatcactccataaaaagaacaaatgggaactgaaatatagaacagctccctagtttttaatgaatattcattatcttaatcaattgaatgattttcttgctatcgccggtatcaacacgtactaactttgtatttttgatgatatcattgtatagcttttcgccagcaggatatttaccgtcccatcgtaacggaacattgtatacattaatagtgccgttcccattgctactataagttactgatccatctactaatcgtgatccagctaattgagtcacatcttttggatactttgcactcgtttcatctttagaattgagtggcgttccggcggggatacggtaaacgtttagttcatctatattttggtttggtcccaattgtagccagacccgagcatattcgatctcctgtgaggagtaattagacagatcatcattcccaattttatttggcttctctttttctgctttatctgaagagttatcttttgaattagaattatcacctgaagagctatatgcgcccgtttccgacttattcgtggttaaatccgaatctttatttgaagaatctttttgttctgttgtagtatttgcaactgatgtggacttctcttttgaaggagttgatttagattgttcatgactattggttgaacacccaacaagcatgagaataagtaatatcaaagaaatattccaacctaaaatctttttttgcttcttcattctcccattcctttcttctcattgccgacgttcagttaaaattcagttctatagtatacgtttataatgatcttgtattgaaaatacaaaatataataactccaaacggtttatcctaaatatccatgtctgccttctcctcttttaatcattgctgtatgatatctcattataagtttatggcgaaagctagtattaagtattaaaaccaaaagagagaaattaccaagcttatccaaatataatccttccctcattagccattatattggtcctccaattgcgattgcaacaagcaaaagataagtgaagacggctcccccaataaatagtacaccgtttaataacacacttaaaactacaacaggtttattttttgttcttattccccagatcatagccactaaaaagcccatgtctatcattgaatagaatatgacaacaacccataaatttacattttgaatttgcctgatgatcattaaaaatacgattgcggccataagcaaaataagagttaagaatatcggtttcccatcttttttcttatttttgaatgaatcacccataaaatcacctcggaagtagagcttgctgcacacatttagatacacttaagctctaacgttttgtagtttaattaaaattcagtgttataacttaaaataagcttattcataaattcctggtattctgtattttcctcgatggatggtttgtgatattttggaagcacaattgctatgttctcttctaaatataaaaaagaatggttctcgtcctggtgaattcttacaatattcttccacattattttatcttctgctattggtttctgtgttcatccttaaaaaggaatcagaatcagcttgaaaaataaacataaatttttttaatttttctagatttcttcttgtgttatcctttttcgcttttctcatcaaaagaaatttccagcaaggagaaaatatcatagctagaaagattgtgactgcaatatttatcaggatggatctgatactagagtggtcaaaatagcttaaaagaattagacaaactaaaatagaaaaagcatgtaaaaaacgtcgcaatttaatgccgaatggtgaaaaaaagaaatcatctttcactaacgcaaatatatcttcatcttttacttcataagtgattttcaccggcattgtaaatatcctttcttttaaagaaatgcttataaatctttttcgtcaatttcccactctgccttatctgcagttgaatgaacggaggtagctataaaacgatatggcgcttttcctgttaacttataagttaacgtcccttccattttctttccaggtgctaaatccttattgaagtcagcacgaatgaaatccaactgttcctcatcattgttttttagttggaaaagatcaggagaaataacaagtttctttggctccttattttccaaagttaccgttagtacaagctcatttccatctttatgcacactatttagtcttaccccatagttattaccaagttttgcaccctgctttacggttaaaggatcatttacattgttaacattaccagtatcatttgtcgtttgtcttacatgattggttctctctttattagcacaggcccccagtgaaccaaccaggaggaacatgagaataacaaggcccactatgtttctgaacaatatatacacccccagacattattttaagcttatatttatttaagaataacatatatgaattcgctgtcaatattcaaaatcttctttagtataggcattggataagccggtaagcaacattttcaataaaacaacggatatatttctttacccattcaaaatataaaaggaacacgcgcagtaaatttatgcaggctcagaaccaaaataaaaactcaaagaaaaatatgattttcataaacgctagcggtttatctagttaaccatatgaaaagcggggaggggcaattcccccgcttttgttggttctctgattgccactagtaaaagaaaatcgttacaccaatatttagctgacattattcatcccacaaccgtgtataattaattttttcatcgagagcccttgccaaaatgctatatcccctgaaactgtaagcagtcagacaattaaaggtcgttgatttattccactaaagaaaaaagacgtttgtaggaacattatgacaaatgtaaaaagaaattgtgagtttttgattttaatggggtaaatttatttattataagtgtctaaatttttccactttggtcggttttgggcgggtttcaatagattaagctactcattcctgtggtaaatattgtaaaacggaaaaggatgattttttttgaaaaaaaagagccatgaaagccactcctttgttaagatataagtacgaccaaatatccagggatgaaagacaaaaggagaatccctcgcccccaaaatgtccttcataatggggatgaaagacaaaaagagaatccctcgcccccaaaatgtccttcataacacggatgaaagacaaacgtagtatcccttgccccccaaaatgtctttcacaaccggaatgaagaaaaaaaagatagcccgccgcgcaaatgtctttcataacagaaaaagaacaaagcgggagccatccctatccttttgtaaatctgtcttcaaccctcttatacaaacaaaatcacgacaaaataaacggccatggcggcgaggccgattgggaggccgaaccgggcccattcccggcttgtgatccggagttttccggcggagataatattcgggatattgccgggtacaagcatgcctccgctgatcagcagtccgagcaaaatggcctgtaccgttttgtccgccattttcgggctgatttctgctgctgccagtgtcgcattgtccagcacggctgaaatcatattgatccagtacaaaataaacgggctcaaatcgagcaggaagcggttaatgagcggttcaaaccctgcgccgagcagggtcagccccatcacaaacaagtaaattttcactgtccgccccgcaatttccacatacgactctcgtttatgcgccgttttcagcccgatcgccgactgttcgggtttgatcacaatggcagccagaatgccgaaaatcacaactgccgaaatgacttccggcccgatcaggcgaagcaaatagaaaaagtcctcccccagcttgctgatcgcaagggtggagagcggttcgccgatcggcgtcagtgcggcgccgagcccgatggaaaagcaggagtagacgacgagctgtgtttccgatttccggtcaagccgcagcacgctgacaatcacgactaaaattaaagcggcaataatggccgtgatgacactcgaaagcaacccgagaatgattaccgtcaaggcagccagaagcggaaacggtatcccccggttaatggcggaaattactttttcaagcggccgctccagccagcggaacaacaggccggctacaaatacggcaatggtgatgttaaccgggtcttccaaagcctttctcaacagaggcttgtctaggacaccgccggcaatggacgcggcccaccccattataaacaaaaatatttccaaattgcgctcgactaacggcacaaaaaaaggcaataacaagacgagcgccagtatgatgatcaaagcggaaatcatcggctcaaccctttctgtccaaaaacttattatcattttatcacaaaacgctttttttacttcgttttacagaaccatgcacattttggggcatgcgcctatatactaatacagccggtaagaaaaatggcacggcaaagcggcttttgcatgggccgcaggaagtagagaaattcaggaagggtgagccggaatgtgcggaataaccggatgggtcgattttcaaaaagacttgcggagtgaactggaaacggtcaaaaaaatgacagagacgttgaccaaacggggaccggatgatacgaattactggctttcgccgcatgcggcattcggccataaacggctcgtcgttgttgaccttttatgcggtgtgcagccgatgacgcggcaaaaggacggaaagatgtatacgatttgctataacggcgaattgtacaatacggaggatttgcgcgcggagcttttgaaaaaaggctatacttatcagggccactcggatacggaagtgcttttaaccgcttatatcgagtggggagaggcatgtgtggaccgcctgaacggcatttttgcgtttgcggtctgggacgggaacaaggaacaggtatttgcagcacgcgaccgccttggggtaaaaccatttttttacaaagcacacggaagcgggcttttgttcggctcggaagtaaaagcgatgctcgctcacccggatgtgaaagcggaagtggatgaggcagggcttgccgaaatatgggggctcgggccgtcgagaacaccggggacgggaatatttcgcggcatggcggaactgcgcccggcacatgcgctgaagatggatcgtaacggattaaaattgtggcggtactggaacgtgaaaagcgcgccgcatacggaggcagcagaggaaacggcggaaacgatccgttcgctcattcaggatgcgattgtccgtcagcttgtctcggatgtcccggtttgcacgtttttatccggcggcgtcgattcaagcgccattaccgccattgctgcaggccattttcaaagggaaggaaaagggcggctgcatactttttccattgattacgaagggaacgaccgctatttcaaagcgaatgattttcagccggatgctgacggggtatttatccgcaagatgtcagaagcatttgatacagtccaccatcattgcgtgatcacgcaggaagaactggccgaatctttaaaagcggcggttctcgcccgggatgtgccgggaatggcggatgttgactcatcgctgctctggttttgccgcgagatcaaaaaggattttactgtaagcctttcgggtgagtgcgcggatgaaattttcggcgggtatccgtggttccggcgcgaagatgatttgaaccgtgaaggcttcccgtggatgcggtccctcggtgaacggatcggcctgttaaaagaaggctggcaggaaaaattgcagctaaaagattacgtgatgtcgaaatatgaagcgtctgtggcagaagcgccgcttttggacggcgaaaccgatttggaaaaaaagcgccgccagctgttttacatcaatatgctctggtttatggcaacgctccttgaccggaaagaccggatgagcatgggggcgagcctcgaggtgcgcgtgccgtttgccgatcaccggattgtggagtatgtctggaatatcccgtgggagatgaagatgtacggcggcagggagaagggcattttgcggaaagcgctggagggcattttgccggaagagattttataccgaaaaaaaagcccgtatccgaaaacgcaccatccggcttacacggcagcggtgaagcggtggctcagtgaagttttggaacagaaagattccattttgtatgaatttctgcatcgcgatcaattaatggagctgatggagacagatgggaaagcattccggacaccgtggttcggacagctgatgacgggcccgcagctgcttgcctacctcgcccagatccattactggtttgaaacatacaggattgacatcaaagcttagccggctgcttcaagccggtttttttgatttcagggagcttcacaagtgctttaaaacgtgaaatagtccaaccggatcatcaggagaagtcccggttcaggcaaatttcgcaggtgcctcaaaccccgcccctgctgatccgattttccctgttgctgaacccgtgcgcctgttttttactttctttttttcgttgcttcttccggctgcggcacggcaggcgggatcccgctgccgaataagttctttgtaaaccggatccactcttttaccgcaaaagaaaggtattggtgtttcggccagatgattgccagattccacgggaggacaggttcttccagatgaatgattttgacgcgttccgggttaaacgcatggcatatcgtactcggcagcagggcaatgccgagattggacgccaccaattcgcagataaggtcccactgcgtgctttcgtaaacaatattcggcataaacccgagcttcaggcattcctttataatctggtcgtgaagggcaaaatctctgtggaaaaaaatgaattcctcctctttcagctgtgtcagccggacgcttgtgcagcctgcaagcggatgggacgggtgcacaagcagcacaagccggtcatggacaaacgaaaaatgcccgaacacctcatcatcaaccggcatcacgacggcgccgagatccaatgtcccattttcgacatcatggactacttttcttgtgacatcctccacgagctggattttaatatccgggtaggcatgatgaaattcatcaataacccggggaaaatagcgcgacccgatcattggcggcagcccgatccggatcgtgccttttttcaggccggccacatcattgatcgcatctgtcagctgccggaaagctttcagcgttttttgcgcctgctgaaaaacggcctgcccggcatcggttaagacgatttttttcccggcgcggttaaacaaggggacgccgagttctgcttcaaagcttttaatcattttgctgattgtcggctgcgatacataacattcccgggcggctttcgtgaagctgccgtgggtggcaacggaaacaaagtactggagatgctggatatccaactggaaccctccttgtatagataaaaggcatttttaccattctatatattcattttacctattatcgcaggcgcggtaaactagttatagaaggtgaaaatattgaaaaaaatcctgatcggaatgttacagattgccggtttgtatctgttcgctgaagccatgggcgcggtcgcaaaactgttgcgcatcccgctgccgggcagcatgctggcaatgattgtcctctttctcctgctgcaattcggcattgtaaaaatgggctggattgaaatcggggccaatttcctgatggcggagctgctgttgttttttattccgtcagcagtcggcatggtaaagtatagaaacctgcttgtccataacggcccggaaatcctggttgtgatcctgatcagcctgattaccgcgatggcttgttcgggatggcttgcggacaaaattgcaaatcgaaggagcgtgaagatgcgtgatcgttaaaattgtgtgcctgctgttaacggttggaagttactggattttcaaaaaactgcacgggaaatataaaaaaatctttgtttccccgctcttggtcacgccggtattattaggcgcctttttactcggggaagatataccgtaccgggactatcagaaaggcacctctattttaacggatttgctgcagccggccattgttgcttttgctgtgccgctttaccgccattttaaaatcgtccgccaatatgcggttgaaattttaatcggcatcggggcgggatggctgatggcagtattcctttcctcggccatcgccacgcttttccatttcagcaaaagcctggagcacagtatcatcccgtttacgatcacaaccccgattgcaatgggcgtttctgaaaaaatcggcggcgtgccgtctataacggctgtctttgtgatcttgaacgcgattatcggttctgtgatggcgccgtggctgatcaagcatctgcgcattaaaaacgaaattgcccatggcatcctgcttggaacgcatgcgaacgggatcggcacctctaaagcgtttgaactcagcgcccggtcaggcgccatttccagcgtcagcatgattatcgttgcggccatttccatttttgttacgccgtggatggtatcccatatcattcattaatctgaaagccgcatattcttcctttttcaatgcaaaatatagctgtaaaaaaggaaaggagcgtgcaaatgggcaggcaaaaatacggaaaccagaatgctgagcggaataaaaatgccaagcttggaaatgaggttgcagaagaactcgtggaattctccacggggagaaaagatgaaatcgaccagaaaaagaaaaaaggtgtgcgtaaataaaggaagctggcctcgccccgtgcaggccggcttttttgttttgatggaaaatccgccccgaaaccggtacaatgatagtaacaggcctctggaggaagtggtgaatttggcaaaaatagcaaaaacaaatgcgatgcggctgcttgatgcgcagaaaatcccgtacggcatgctgtcgtatgaggtaaaggacgggaaaatcgacggcatctccgttgcggcaaaaatcggcaaaccgccggaagccgtttataaaaccttggtcacgcaggggcacagcggtgaactttatgtgtttgtcatcccggttgcggcagaactcgacctgaaaaaagccgcaaaagcagcgggcgagaaaaagatcgaaatgatccatgtgaaagatatccaaaaatataccggctatatccgcggtggctgttccccgatcggcatgaaaaagcactatgtgacatttgtcgatgagagcgcagcaacgcttgatgaaatcgttgtaagcgcaggaaaaattgggacacagatcactctttccccgcaaggattgctggaagctgcccatgcaagatatgccgctttaacgcaggaaacgcgataaagcggcatatcctttattttgccggtgcagatgtttcgcccggcatgttatagaccattttcccgccgtaatggccggtcaaagccagcgtggttgtgccagcaatgcacaggacaagcacaagcggcatgatccatttatacggtttgaaacgggcgagcagtttgaaaaacaggacggcgccgaaaatcgccatggtaatcagggcgtaatgttcatgtgtttcgaccatcgaatgtaccgcctgcccccatttttcccttgcatccggaatcgcagagtcgcctgtcatataactggcgattcccatcacaaaaccgttgccgaataaatacagcgccatcttattgaaaaattcttttttccacagtgcaacaaactgaaagataaccccgaatatcagcagggcaatcggaaaatgcaccagtaacgggtgtatcggtgttcccattttgataatccccttcttctttaatttacaggcccagtatacaagccgtatctgaaatgaaactgaaaaaacaaaattaactttagaatcttttctacccgcatggtatgataaaaataagaaatcctttcggacgaggggatgaaatatgaaaattttactggcggaagacgataggcgtttcggcaaattgctccatcatatgctggaaaaagaaaaacatcaggtcgcatgggaacaggacggtgaacgcgcttatgacgaagcggtgttcgggtcttatgacatgctggtgctggactggatgatgcccggcctggaagggattgagatctgccggaaactgaggagacgggtttccaggggggcattatcatggtgacggcacgggatgcagttgatgatgtggttgccgggcttcgggcaggcgcagatgattatattgtcaaaccatttgcctttgatgaactggtggcgaggattgatgcgctcggccgcaggaagttgaaaacatatcaggaaaccatcacatgcgcttatctggcattgcatcttgaatccaagcaggcggaagcaaatggcaaaatgatcccgttaacaagacaggaataccagctttgtgaatatttcatgcgcaataaaaaccttgttttgccgcgcgaaaaaatcatcgagcatatttgggggctggacgaagatatttccgataacgcgctcgatgccctggtaaaacgcgtacgtaagaaaattgacagagaaggggaaaggtccttgattgaaactgtgcgggggctcggatacagaatgaatgatggccatgtttaaaccgatccggaaaaacttaaccattgtttacatattgaccttttttctgtttcttatctttattcttgccgtcatgtatgtaaccgtccaaaaagtggcggaaagggaacaagcaagagaaatccgccagtatatgaaacaggaggcggccatcagcaaaagcgggatcgcacgtttaaaaggaaaacctgccgaaaaggtgaaggaagcggaccatccgtatttctactatatttttaagctggacggcaccctgctcaagggagaggaactgattcccggcttccacacaaagatgaaaaaatttgttacggagaaaagctccccatctggcatgtatgaaacggaatataaagaacggcatgcaatgtaccatgccgggatgagaaccgtcccgggcataggccgtgtgtacacggtggttggaattgaaacaacaggcgcgcatcttgttttgaaaaaactgcttttgctgtttctattcctggctgctgtatttacgggggtgcttgcgctgctcagttattttctggccggaaaagcaattgtgcccatccagcaggcttttgacaagcagcggaaatttgtgtcggatgcatcgcatgaactgcggacgccggtcagcgttttttacagttcggctgagctgctggaacgggaagagggggagaatttgagcgcgttcggcaggggaattgtcgccgatttaaaaacggaagccaaattaatggcagccatgctcgatgatttgcttttcctcgcaaggagcgaccagaacgtgcagccgtaccgtttcgaagaagtagggctttatgatttatgcacttccatcgcccgccggttccagtccgggctgccggaagagattctgcttgtgaacaacctgcaggactgcccggttgtctggggggatccgacaaggctgcaggaactggtttatatttttcttgaaaatgcgcgccaatacacggaaaaagggttcatcaaactgtcgttgtacaaaagaggcagctttgccgcgattgaaatcgcagacagcggaatcggcattgacgcccatgaccttccccgtatttttgaacggttttacagaggagataaagcaagggtgcgtgacggaaccggtctcggcttgtcgattgcggagaccatagcgaaaaaacatggcggcaggattgaggtggaaagcaagccgggagaaggcaccatttttaccattttcattcctttaaaggaggtgcatcatggataaactggaagtggaataccaaattgccgatttgaaagcggattatgtccgcctgcagcaggatttggaaaaacttgagtatgtaaaagggaatctccacccgctcgaaaaacagctcgcggagattgaacaggcattaaagaaactgtaccagcaactggaccgcttttaatcctttgcttgcaaagaaggggcggttgctgctttttcaccggatcaccccaactttaataagattgcaagagccggttccggcagaaaaggaaaaacggtttccccgggtttaagcaaaaaaagcggcaaatgctgcttttatgcaggtatcgccgcttttttctatttttttgcatcccaaagaaagtccgtgacaatccggtccacgcgcttattctcatgaaggctgctgtgctgcgcatttttgccgtaaacaattttagacgtgtattgctttttcggcacgatgaacctgccgccaagcgcgctgtccagggaaacaagggaatcccccaatgccggtttttccacaacgcctgcaatggcaagcacctgaatatgcgggctgaagcggtttttgttggcatataaagctttgaacgctacggaacccggaagcaggtcgcgcgccgcatcgccggtattattcggattttgcttaaaaacacggataagcacgccttcataagggcttccaatcgtgacaagcttttgaatgaccggatattgccgcctgccggaagtatcttcaatatattttgtgcaaatcaaaccgcccatcgaatgcccgacgagatttgcttctttcacattgtatttcgtataaagaatgtgcatggttttttcaagccagccggccgtttgccggaaacttgcacggttatcggaaaaaatgacctggatcatcggatgccgggcccggttggaaatttccccattgaccacaatcatcccgtcttttgtgacgcgaatcaccattgctttttcagcaactccgcttttttccagccggccgagcatcccgttaaacgatcgggccgttcctttatacccgtgtacaaaaacagtcggaacgggtttttgtgccggcggggccgcagcagcattgcttttgtccgtgcgatgggaaaaccatacagttgaaaggctgagcataagaaacaaacaaatcatggccagaatcgcattccgatgttggatatatggcatgctaacaccccttgatggaagtcatggtgtaactttcctgcgaaatgatgttcattttatcatacaaaatagcgaaagggaatagggagaaagcggttgtaacagaatttttccgataccattgacgaagaaaaagtttcattctatgatgtggaaaacgctggtttctttactggtgaataggcaggcgtaaaggagggaaaactcctgttgtctcgtgtatacgatgatggttataaatggaggaaaagttgtggattcaatacttgaacgaattcaaaaggaaatgcatcactttacgggcactgaaaagaaaattggcacatatattttggagcatcctgagatggttccgatgatgaccacaaaagatttatcagaaaaaaccggcgtaagtgagtcaagcgttgtccggttttgcaaaacaatcggcatggcaagttttaaaacgtttaagctggagcttgtgaaaaatttaactttaaccgaaagccatatgacagatttttcaattttgcaacaaaaagattctccttatgatttattccaaaaagtcacttatgggaataaaaaggcgatagaatcgtgtgtttcttcacttgacaggagagagctggaaaaagccgccgatgtgcttgaaaatgccagaaaagtggtgtttttcggtgtcggcgggtcggtaaccgccgcagtcgatgcatgctataaatttacaaggctgggctgccagtctattttttcccaggattaccattacctgatctccctgattccctatatgaataaaatggatgtgtttgtggcgctcagcgtttccgggcggacgaaggatgtactcgaactcgctgattttgcgaaaaggaaaggggcaaaagtgattgccatcacgaatatggagaaatccccgctgtacaaagaagcggatattaggctttgcacgccggtaaccgaggaagatttccggatcggaacgacgtcttcgagaatggcgcagctgaatatcattgacgcgctctatttaagtgtttttcagcgcaagggggaagacattttgaagtattacaatgaaacgagaaacgaatacctcaggctgcgaagataacgggaattttgtaaaagcccctacacaagatttatatctttcttttacaaatccaacatacttccttcaaaatccttttttacaataagaggcgtaagcacaaaacgaaaaaggggaggaagaacattgggtaaaaagaaccgtatgatgaaagcggcaattgccttgtctgcagtggcggtattggggatatccgggattgcaaatgcaaaagcttacaagccttcgcaacacaccggtcacgcaacttccgtgaagacgaagaacgtgattctgtttgtcggggatggtatgggggctgcgcaacgggatgcgatccgccttgcttcaaccggcctgagcggggaccttgaaatgaacaaaatgccgtatacgggggttgtacatacaagctccacctccgtggtgaccgattcggctgcggctgcgaccgctatggcgtcaggcgttaaaacgtataacggggcaatcggtgtcgatgccaataaagtaagcaaaaggaccgtccttgaagaagcaaagcaagccggcaagtcaacaggattggtcacgacaagccaaatcacagatgcaacgcctgccgctttcggtgcccatgtcgaaaaccgttctgaacagagcaaaattgcaaagcaatatttgaaaaacagcaaagtggacgtgttgctcggcggcggggaagattactggtacccgcaaggcacacagggcgcttataaagaccacccggcaaaagatacttccgaagcaagcaaaggcacggaaggaaatcttgtcgacgaagcgaaacggctcggttaccagtatgtttcagatgcttccggactgaaaaaggcaggcgggaataagcttttaggcctttttgccaatgaagaaatgtttgaacagcgagaggaaggccaaggcgaccagtacgacccggttgtttcacttccggaaatgacaaaaaaagcaatcagcacgctgtcaaaaaataaaaacggctttttcctgatggttgaagaagaagccatcgatgaaatggcccatgaaaataacgcctcccagctgatcaaggcgggccggcaactggatcatgccgtaaaagtggcaaaggattatgcgaaaaagcacccggatacacttgtgctcgtcctggccgaccatgactgcggcggcatgacggttgaaagtgccgataacagcgacgaatccggggacggcatttcaaaagaagacgggccgttccaggtggcgggttccagcgcgcaatttgtcgtggactggacaacttccggccatacggcagccgatatcccgctcacggcgacaggcagcggcgcatcgttgtttgaaggcacttatgaaaacacatatatccatgatgctttgctgagagcgatggggctgaaaaaataatatataccggccggacaactgccggggtggttttctccgtataccaccccggcaaaatctgttataatagaggcaaattttgcggaaaggatgggagccttgtggcagcaatggaaaaagccaaacaggttttaaagcaatattatggctatgatcatttccgccgcgggcaggaagccattatcagccggatcatggatggcaaggatacactgggcatgatgccgaccggcggggggaagtcggtttgctaccaggtgccggccatgcttttatcaggggtcacgcttgtcatttcgccgctgatttccctgatgaaagaccaggtggatacactttcaggcatggggataccggcaacatatgtgaacagctccctggatccgacagaaatcaatgagcggcttgcggctgcatcaaagggcgcatacaaattaatttatctcgcaccggaacggctcgaatttcctccttttttgcatcttctcgaaaacatcaatgtctcccttatcgctgtcgatgaagcgcattgcatctcacaatggggccacgacttccgcccaagctaccgtttaatcgaaaaactaatttcacaattcaagccaaaaccggtgacgcttgctttaaccgctacagcgacgccgcaggtaaagaaagacatttgccagctgctcatgattccggaagaaaacacagtggctacaggttttgcccgtgagaacctgcatttccaagtggtgaaaggccaggaccgcgatgcctttgtgctggactacatcctgaaaaataaaaaccagtccgggatcatttacacggcaacgagaaaagaggccgaacgcatttatcattttcttgttaaaaatggcattcgtgcgggaaaatatcatgcagggatgaaagaagcggagcgcggcagctttcaggacaggtttttatacgatgatgtttccgtgatggtcgccacctccgctttcgggatggggatcgacaaaagcaatgtgcggtttgtcatccattatcatatgccgaaaaatatggaggcgtattaccaggaagcaggacgggccgggcgcgatggggaagaaagcgactgtattttgttgtttgctccccaggatatccatacgcaaacttttttaattgagcagtcagccaacgaagacagaaaactgggcgagtatgccaagttgcgaaaaatgattgactactgccatacggaaggctgttttcagcagttcattttgcattatttcggcgaaaaagaggcacagccgtgcggcaaatgcggcaactgcttggatacccgcgcaaaaacagacgtgacaaaagaagcgcaaatggttttttcctgtgtcaaaaggatgcaggaacggttcggcaaaaccatgattgcaaaagtgctggccgggtcaaacgaccagaaaatcaggcaattcggttttgataagctgtccacttttggcattatgaaagacaaaacgcaaaaagaagtggctgaactgattgattttctgacagctgacggttttttgcgtgccaaagacggtacgtacccggtgcttatgctgacaaaaaaggcagtggaagtcctgctttcaaaaaaacaggttttccggaaagaaagtgtcagggcgcagcaaattgcaaccgataaccttttatttgaaaaactgcgcacacttcgcaaagagattgctgaccgtgaaaaaataccgccttatattgtcttttccgaccagtcgctgagggaaatgagtgccaggatgccggtaaccagggaggctttcctgcaggtgaaaggggttggggaaagaaaggcggaacagtacgccgagctgtttatgcacgtgatccggacatacatggaagaagaagggatacaagcgcaagcgcagccgaaagcattgccgcatacaaaaaaagcgcgtgaagacgggaaagaaaaaagccatcatgtgacataccgcctgttacaagaaggcaaaacgatccgtgaaattgcggaaatccgcggcatgtcggaaagaacgattgaaacgcatgtgatcaaatgttcagacgagggatttccggtagaatggagccgctttattcccgaaaggtaccgggagcgaatcgccgatgccgcaagccgggcaggtaccgggcggcttacgccgataaaggaattgctgccggatgaggtcagttattttatgatccgggctttcttacaggaaaggaagcatcatccggaccaaggaaaaacagtatcatatatttctggaggggattggcatcatgattgaatgtatcgcgtctgatatggatggaactttgctcaactcaaggcaggaagtcagcccggcaaatgccgaagcgattaaattggcacagaaaaaagggattcactttgtcgtgacaactggccggtcttatgaagaagcgcggcttgtgctcgatcctgtcggcattgactgtacggtcatcgggctgaacggggccgaagtgcgggatgaaaagggaaaattactcaaaacaagcgggctggatcccctgacagcttcccgggttgctgatgttttcgaccaactcggcatttattatgaattttttacaaataaaggcacttatacggaagattacgaggaaaacatggatatgctggtcgatttgttccattccgcaaaccctgaagtgccggtggaagaagtgcgaaattatattgagcagcgcggcatccggagatacgtccataatattggagatacaaaggatatttttcacgatccgtccattttgttttacaaaatactggcctttaatgaagaagaacaaaggctgcggaaaatcggcaaggatcttgaaaaagactttccagatattaaagtgacttcatcaggattccgcaatattgaaatcaaccatgtgtcggcgcaaaaagggattgcgctcaaggaatacacggaaaaacacgggctctcgatggaaaaaacgatggccatcggggacaacttaaatgatatttccatgctcgaaagggtgggctacccgtttgcgatgggaaatgccgaaaatgaagtattggaaatttgccgctaccggacgaaaagaaatgatgaagacggcgtggcaaaagcgatttacagaatgcttgaaatgtgttagaacacaattgccccccgtttatattggtaaaccggggggcaattatattgcaatgacggcgtcagagccccttgcaccactcagcccatggcgcctttacgggctcgctttttaccattaccggacccggtcgttttcccagtcatacgtccagaagtattcataatggagccattccagggtttccgggtccttttgcttcagtttttcttcccgttccgccatcatccagccggtctgggaaaggtgggctttcatggcgccgattttttgctcggctgcgccgctcacatcattgcggacatccggctttccgatctccgcttcatggtttttggaaaaagcaacgcagtggagtttcgggcgtttgtcttcaggaatccggcggagcgcgcggacaacggctcttccggttgcttcatggtcagggtggacagagtagcccgggtaaaaggtaatgacaagtgacgggttcagctcgtggacgaggtcgagtaccattttggccatcttctcatcatcttcaaattctaccgttttatcgcgcaaccccatcatgcgcaaatcctggatccccatgatttcggccgctttttgcagttctcttttccggatatgcggcagcgattcccttgtggcaaaagggggatagccgagatttcgcgccatttccccgagcgtaaggcaggcataagtgaccggcgtgccgtttttcacatgggttgcgatcgtgccggatacaccgaaagcctcgtcatcgggatgcgggaaaatcaccagaacatggcgctctttttccatttttctcatctcctcactcaaatggtgttgtactcaattcgagggcaacggccagcttcccgtcaaaaccgtggcctgcaaaaagcaggcggtcgaattcatctttttcaaagtgggtcaggccttctgcataaatccagccgattttcattttcaggccgatccggtacgggccgtccccaacaatttttccgtgttcataggatacttgcgcattgcggatataggcgcctgcagagaaaaatgactcattgacatgggaggcataggcgccattggttgtttccaaatggatatacaccggttttccggcaagttcgtccagccatttttgggctgtttgtttttgtatcggttccatttttttcctccttttggccgtccgctcctgtttctttccattataccaaccggcggcgctttaaggaaaaattaaaaaccgggtccccggcggaaagttccggcagggcccggtttggcttaagagttggtatgcgaaaaacgggtataggctccgtgcatcacagggccgacatattcgttcagcttaaagccgtgttcaatcgccatatggacaaattcttttgccactttcactgcgccggacactgtgttgccctttgccagttcggccgtgatggctgcggcaaatgtgcagcctgcaccgtggttatatgttgtttttatttttttcgattcgagaatttcaaaatcttccccatcatagaacaagtcgatggcctgatccgtatccagccccctgccacctttgatgacaacatttttcgcgcccagttcatggattttgaccgctgctgctttcatatcctcaacggttttaatcgggccggtttgtgccagctgccaggcttcaaacaagttcggcgttgtaatcgtcgcccgcggcagcaaaagctcgcgcattgcatccgtattttccggctgcaatacttcatcttcgcctttgcataccataaccgggtcaatgaccactttgtcgagatggtattcatctattttacgggcggccagttcaataatatccactgaaccgagcataccggttttcatggcatcaattccgacagaaaggatggtctcaagctgcggttcaacaatgttgacatcaatcgggaaaacatgatgatgccatccgtttttaggatccatcgcaacgatggaagtaatcgcggacatgccgtaaaccccgagttcctggaatgttttcaagtccgcctgaagtcccgcgccgccgctcgaatcagaaccggccagcgtaaaagttttctttaaacccatcacgcacccatctcctttaaaataagctttacactattttagaatataatactgccataaaaaatacaaatcccggggacgggcagtatgtggcaagtttttctcgatagtatttaaatattgggtttttcaagacactcttttttgtacgcttttcggctacttcgcttcgcttgctctcctggataagtggcaataatttttcaaattaatgcccagactgaaattaaaacccaagaattttgcttaaatgccccattgccgatgataggctaatgctaataaaaaatagaaaacacgccattaactttttcatggtaaattccctttctgtctatatcatacggggaaaaggggggaaagtttcatgtatcctatgaactcctaaatacaagggagatctctttccaaaagaaagtgtgtatttctaacataatactattaatacaatagcaataccttttccacttgttttactattgatgttatgttaaactttaaaaaagtttaaacttctttttgactaagtttaaaggggagacttcttttgggggatacacaaacaataaaagaaacgattgaaatgtgttttcattcactatcaaaaaagcagcaaaaggttgcaagttttgtactaaataatccgacatatgttgctacacactcagcagctgaggttggtatgaaggcggagacaagtgaaacaaccgttatccgtttttgttacgcacttggattgacgggttatgctcaattacaaagggaaattaccttatttgtttttaatcaaacaacggctagtacgcttggtaattacttttcatccaaaaaagaactttttaatgaccaacaactaatcgaaaaggcaatagggaaagatatagttagaattaacagaatatccgaacaagtcgataaacaaatgttttttaaagtaaccaagcaattacatgaagcaaaaaatatttatgtgatgggagttggtgcttcacgattcgctgcagaatggttgcattttacaatgagtattcttcggccaaatgtatcgataatccaagctaaaacacctgaatttattcgaatcatgcaggaaataatggacgaatcgactgtcatcgtgatctcactacatcgttattttaaagaaccgcttcaaatggctgaagttttacacaaacgggggattccggttattgggattactgattcaaagttagcaccgattcatgagcattgttcacaagctttcgtattagaacagacagaaaaatcaaccattgacttgatgcctgcactaatatccttcctcaatttattagtaacagggatgatgtcatttgatcctgaatattataacgaacaacgattacattatgatgatcctaacaacagttttatcgcagaataatggagttgaaaaaaatgttggtacaaaaattagcggaaaggttacaacctatttttaaccatttacatgaaaacccagaaatcagttggaatgaagtagaaacaacaaaatacattaagagttttctcaaatcggaaaacttaaaaccaaaaacctttgaaaatatgactggattatatgtggatattggtaaaggaacacctcgagttggattcagaacggatatggatgctctttggcaagaagtcgatggaaaatttcaagcaaaccattcttgtggtcatgatggacatatgacggtggcacttggcgtagttcttctattaaaagatttggcgccaacacttccaggggcagtccgtattattttccaacctgctgaggaaaaagcgcaaggagcaaaagcaatggtcgaacaaggtgttgttgactcgttgcaatttttatatggtgcacatgtccgtcctcttgttgaacttaaggatggaacgtttgcaccagccttacatcacggagcagctaagcttttctcaggtaaaattcaaggtgtagaagcgcatggggcacggccggaagaggggaaaaatgcgattgaaatagcatctgcaatcattgatgggctaaagcgtatttggattagtcctacagagcaagcctccatcaaaatgactcagctacacgctggtggcaccgcgacaaacattatcccagcaaatgccacattcagcattgatgcacgtgcacaaaccaatgccaccatggaggtattaacaagcggcttcgaaaaggttattactgcagtaagcatgatgtatgatgtatccattccttatcaagttgacgcacatgttgctgcagctcaggtcgatgatacagcaaaaatgattttaaaggaagccattatcgatgtaataggggaggaaaactgtgcacaagaagtaattacacctggtggagaagattttcacttttataccttcttgaagccacaactaaaaacgacgatgctagggattggctgcggtgttacaccaggactacatcatccaaacatggtgtttaaccaagatagactatcaacaagttcagtaattataacgcgggcacttgtgttaacactagaatatttagaaaagggtgaaaagttatgattaacatttgcgaactaaaaacaatgaatgaaatggaacaagttcaggaactcgaacgaaaggtttggggaatggaccccgttttaccaacgcatcaaacactgacagcagtaaaaaacggcggtataatcattggtgcctttgacggagagaaattagttggttttagctatggattttccggatttcaaaatgggaagagttatctatgttctcacatgcttgggattgatgaagcatatcgttcacaaggcattggtgaaatgctgaagcgaagtcaatgcaaagttgctatagaaaagggctattccttgataaagtggacttatgacccacttgagacaagaaatgcttttctcaatctaacgaaattaaatggtatatgcaatacatatattgaaaattgctatggagaaatgaatgataaccttaaccaaggtctcccatccgatcgctttgaagttcattggtatgtaaaaagcccgcatgtagttgaaaaacatgttccaaacatacaaagtatcttacctctgaatacactagcatttaatgaaaagggacaacctgtctgtattacagagcaagaaaacgaattaacaggccaagcatattccataactgtcccaaaggattttcagggtttaaaagcagtcagcgaggatcttgcgctggattggcgactaaagacacgcagactttttcaaaaacttttccatgctggctatgcagcggtacaattagaaaagcatgatacaaatggtaaatatatttttattaaaaaagacacattagaacttggaggagaataactgtgaaaattacagatatcacgattcgtcatttaaaaatgacgatgaaaagcccttttacgactagctttggaacatttaaggataaggaattcttactgctggaagcaaaaaatgaagatggaaccgttggctggggggaatctgttgcatttaatgccccttggtataacgaagaaaccttaaaaacaaactggcatatgttggaggattttttaataccactgatcttaaataaggaaataaaacatccagatgaagtgaatcaaatgtttgctccgattcgcaaaaataacatggcaaagtccacaattgaaggtgccatatgggatatatacgctcaacaaacgaaccaatcccttgcacaagccctgggaggaacgaaagataaaattgaagttgggatcagtattggtattcaaaactcgattgatgaattactgcgtgttgtcgatggttttttaaaggaagtgatgctagtatagtttnnnnnnnnnnnnnnnnnnnnnnnnnnnnnnnnnnnnnnnnnnnnnnnnnnnnnnnnnnnnnnnnnnnnnnnnnnnnnnnnnnnnnnnnnnnnnnnnnnnnaggatagactttgttaaaacgcctcaagtagatgtcgagttgccgcaacatggtcgcacatttgaagtgttatatagtaccaggacgatcatcgaaagaatctttggtattctaaaagacggatacagtctccgtcgtgttcacaagcgtgggaagaaggcagttgaagctcatgtagatcgatgcatgatatctatgcatatcatggcaaatatggcgtaccatcagactggaaaggccaattgtggatggacacgcaatcgactgcaaagagcaaattaagttattcacaggtggatatgtgaataactcaaatgaacgttttctttccacaaagggtagtgaaaaaaaccattttgtgaaggcgggatacgtatgccctttttttgaagaaaaatgaccgttttacttctattgaattaaaaatctggatgtaaattgaaaatctggatgaaaaggcaaaaaaatcgggataattaattttccagagcctcgctcaagggtatatttttattttggcagaggctctaaaataaaaagtatcataagattttgccatttatccggttttttcattcatatatttgctcaacaagccatgaaaatttttattttaccgaagaatatgcaaattacccaaacaaaatggggtgggggttctatggcgtatcaagacaaaccatatccatcagaggaaacgcctctacaaaaaatcataactgctgaaaatgttggtttgttcgtaaaaacggccagattggaaaggggattgacccaaaaagacctggccggggatactttatccgaaagaacgattcggaggattgaaaacggcaaggtattgcccaacctgtttacctttttttacatattatacagactcgacttacctgttgaacgttttttatatttcataaataatttgtttttatagcggttacacacttccgcgcctgaatgagttgtcgctgccaaaaaccatgcatcgcaaaaataagggccgcttatgcccctgataaaagcagaaacagccggcttaaggaacgccggcccggtccggttttatagcaggtgttcaggcccctcctggttatccgtggcgatgacgacaacgcgcccctcgtcgagtactttttcatactgtacggcttccatctccgacaatccgagcgactgcattttcgaacgcagttcatcccctcgctccctgaacagattgccgaccgaatcaatgactccttgttcttccatgccgacagatcccgtttccgttgcgtcggttaaatcttttgaacggtctttgtcatgcgagaaaatataaatattgtctttcgcaaatccttcattttcaaactctgttatctttttcgtcgcttcgagcccgttttcgaccacttctactttatgcacctgtcttcctccttccgaaaaatgatgatactgtttgacatttatataaccgcttcctgccgtccttaaacaaagaaaagttttacagccgccggacaaggaaactgataaaatgaaagtataggaaagaaaggggctgtaaataaaatgaaggacatttttaaaaatgattggggcccgcttttaaaggaggaattccaaaaaccatattatttaaaattgagggagttcctcaaaaaagaatatgcaacacagcgaatccatcctgatatgttcgatatctttaatgcttttcactatacggcttatcgggatgttaaggttgtcctccttggccaggatccttaccacggaccgggccaggcgcacgggcttagtttttcagtaaagccgggggtggatatccccccttcgctccggaatattttcaaagagctacatgacgatgttggatgcaggattccgcagcacgggtgcttggtcagctgggcgaagcagggcgtgatgctgttaaacaccgtgttgactgtcagggaagggcaggcccattcacaccaaggaatgggatgggaaatttttacagacgaagtgatccggaaaatcaatgcgaaagaaacacctgtcatttttctgttatgggggaggcctgcacagagcaaaaaagcgctgatcgacaccaacaaacatttcgttttaactgctgcccacccaagcccgttgtccgcccatcgcggttttttcgggagccgcccgttttcaaaaaccaacaatattttgcgcaagttgggagaaaaagagatcgactggcagctgccggaacaggaaaagctttaaaacgcattccatcgaggaaatccgacaatgttccacgtgaaacatggcggcttttttgcaaagtatgacagcgttccgcattgttcggacagacggcctctgttaaaataaatgtaagaaacggaatctcttttggcagctgtcattttagcagacggcaaaggcggctatcaaaggaaggaaacattgtcagggccggcaccatgccgcctttatgcgatcggaagaatgaaactcagccatcacaaattttcaccatgttgcacgtaacgcggcaccagcagtgggatggaaaacaacagggcacaaattttcaggctggaaattgaacagaggtgcggatatggccattacaacggaaatgcttttggaaaaaatggagcaggaattggcaaaggcaaaacaggcaatgccggcggaacaactcagggagcatatctatgcggtaaaagctttgtgcgaagttttattggaaagccagcctgaacagccattgcctgccggtccttctgtgccgaaaccggtgcttaatccggagccgttgaaaacggaagatggtgcaaacggggactctatttttgacttttaatcgcaaacaattgaaacaacgccagccaagcgggagtccctgttttcctctgcagcttcttatacggtttgcactgccatcatagcttcctattggcatccagctttgtatggtgaacatttacgttggcagcgtttcatattaaaaaacgggagtgcatcgcatgaatatttttgtttttctcggagcaattaacgcatgtatatctgttgcgctcggggctttcggggcccacgggttgaaagggatcatggatcagaagtatctggatatttgggagaccggcgtccgttatgaaatgtaccatgcgctcggattgattgcgatcggcattctttccggcaccctcaaatcatccgcactgctcagctggtcaggatggttgatgctgattggcatcgtccttttctccggcagcctttatgttttaagcttaacgaaaatcagtgtgcttggtgcgattacgccaatcggaggcgtcgcgttccttgcttcctggatactgctcggcatagcggcggtaaagtggatgtaagaaaaaacagcccggtttcggagctgttttttctttcgcttatccccgtggcggataggttgccagcggctgaccggcctgcgttgtgctgccatatgggtattcatattcaatttcttcagagaagacaacataatcaacatagaccatcgggattaaataacgctgcccggtttgcgggtcactgagaatgacatggtcccgtccggcagcttcaataatgccattgaacactttagcattccattcccggttgttttcaaacgtggcgtacagcgtgaccagttttcctttattcagccgcaaaatattttcaatatacgattgttcaagcggaagctggccgggcaggttctgtgagggtgcctgcgcttgctgccccccgggaacctggtacggcggataatatcctccgtaataaggctgtgcggactgccggtaataataaggatacccgtatacgggcggtgtgtaattgccgttttccaactgatttccccctccattttgcatatcggtctgccctggtttttgtaaaatgcataaaaaacaagggcattcactacattcatgtgtatgccggccggaaacgggttatgcttaagatctttcggtgaactacccaccacttagaaaaggattggaaaaataactttggctaaagccaaccgaaattcatctcccacctactcattggtgcgattcgcaccttcacattccttgaggatgggagacttctttcggaaagccgttaaaaaatccttccagcaggctggaaggatttcttttaaccaatatgcaaataggaggttaacctttcttcgtcaagcaggctaccaacataaaacgggccgaattccccataccttgcgctggcttcgtcaaaccgcatttcatagacgatttttttgaactgcagggcatcatcggataataaagccacaccccattcgtagtcgtcaagcccggtggaaccgagaatatattgttttaccttgccggcatatttgcgcccgatcaatccgtggcttttcattaactccttgcgttcctccattggcagcatgtaccagttgtcattgccttcgcgccgtttatccatcgggtagaaacagaagtatttggatttcggcaatgtcgggtagagccgctcgcggacacgcggattttcatacgcagactcgtccgctttcccgccgcgcacatagttgctcagttcatttacaccgatgtacgaatatgccggaatggtaaaatcagcaatccttaatttatttaaggctgtttcaatttcttcgaggtcttccagggccggccgcatcgtccataaaacaaagtcggctttctggccggtgatggtgtataaagcataagccccctcgtgtttgctttggatggcatccagttgctgaagaaattgccggaattctttcacagccgcatccctttcttccgcaggcagcgccttccagcccgcccagtcgagagaacggaaatcatgcagtgagtaccagccatctagtgtttctgctgcttcgctcatttttctccctccaaatgtttttctcttcccttactataacacagtttagaagagggagaaaatattacggctgccgcgaaattgtctaaaagaagccttcttttgcctttgattttccggaaaaatggattattcttaaaatggataccgttatacgaggagtgttgagcgtgagtacattttttgacggaataaaagaaaaagtgcgggggcacaacaaaacgattgttttcccggaaagttcggatgaaagagttttaacagctgtctcacggtttgcatccgatgaagtgatccggccggttttaatcgggaacaaggacgaaatccaggcaaaagcacgggacatcggtgtttccgtcgagggcgttgcagtgtatgacccggaagaatatgcaggttttgaagaaatggtgcaggcttttgtggaacggagaaaaggcaaggcgacggaggaagatgcgcgccaaatattaaaagacgtcaattatttcggcaccatgcttgtctatttgaaaaaggcggacggtctggtaagcggtgccatccattcgacggctgatacagtccggccggcattgcagatcattaaaacaaagcagggcgtgaaaaaagtttccggcgtcttcattatggtgaggggcgaagagaaatttgttttcgcagattgtgcaatcaatatttcaccggacagccaggatttggcggaaatagctgcggagagcgcaaaaactgcccggacatttgatattgaaccaaggattgcgatgctgagcttttcaacaaaaggctccgcccattccgatgagacggagaaagtggcgcaggctgtccggttggcaaaagaacgcgatccggagcttgtggtggacggcgagatgcagtttgatgctgcgtatgtgccggctgttgcacaaaagaaagcgccggattccgtgattcagggcaatgcaaccgtgtttatttttccaaatctggatgcggggaatatcggttataaaatggcccagcgtcttggcggttttgaggcagttggcccgattttgcaaggtctgaatgcgcctgtcaatgatttgtcgcgcggctgcaatgcggaagatgtttatcatttggctttgatttccgcggcacaaagtttgtaagggagttgccaggcttccggctgttgggtggacaaagtttggaggagagcgggttgatccttgggagcagcccggcaggcaaattgccggcaatgtccgcatccggcagcattgtaatttttttaactaaatgaaataaaactgtgtatccatgccgcaaggattcggcatgagcggaaaagtggcaaacagccggcacagtagtaaagctgttggacattgcgcgggaaaatggcctttggtatgtggccgggactcctcttttccggcttgcaccctccggaagcgccggggattagagtgcttgccttcttttggtttggcttttgcatgatgccaaaccttttttatgttttatacggccggagagaaggcattttataatgaaagaatttggggagaaaagggaaaaggctgaatttgatcgtattgggaatttatgtgcagccggggcaatttttactaaggcatgcgatagccgatggttcagcactgctctcgaatccttgccaatagaggggtttcgagcgcagctttttggtagtcaattcggcatgatatgatagtagtaaaataaatgggggaaggatcaacatggaagaagcgctgcaattgctgaagcagcccgagtggcgggtgatggaccagtccgggttgggcccgcagtttgaagcggcccagtcatttgcgatggacgacacattgtgcacctctgtaggggcaaacgcctccccggctgttgtccggacatgggtgcatcacgacaccgtcagcctgggcattcaggatacaaaattgcccttttttgaggaggggctggctgttcttaaaaatagaggattccggtatattgtccgtaattcaggcgggcttgccgttgtattggatacgggcgtgctgaacatttcgcttgttatgccggatacggaaaaggggatggatatcaaccgcggatacgaagcgatgtttaagctggtccaaatgatgttttcggattttccggttgtaattgaagcgggggaaatagcaggctcgtactgcccggggagttatgatttgagcattggcgggaaaaaattcgccggcatctcccagcggcgggtcaggagaggggtggctgtccagatttatttatgcgtgacgggcagcggcgccgacagggcagaactcgttcgggatttttatgagcgggcaaaacagggcgcggagacaaagttgcaatacccgtgtgtccgtcctgaagtgatggcttctttgtcggagcttttacaggaaatactcacggtccaggacgttttcatgcggcttttgcaaacgctgaagacgctggggagccggcttgtgtcccgcccgctttcggaacaggaaacaaaatggtacggcaaatattatgaacgcatgctggaaagaaacgcccggtttttgtaaagaatggatgataatgggccattccttgatctgatgaaagacattcttgaggtgtggccggagtccattgtctttcatgtgcgggatgaaggacaatttaaagtggcggtagcccgtttttgtctttcatcgggcgagtgaaggacatttggaggttgtggtgagattgttttgtccttcatggggcggatgaaggacatttggggccggtgatggcctctgttttatccttcatgaagcggatgaaagacattttgatacgcggctgggagggcactgaaaaagacccccgggtaacaacgtccaattgttttttagaatggctccaaaagacaaaacacaccggggtcaaaaagccgatgcccggatgattgcctgccccgggcattaaaaacccattgagcatgcaccgcccaatgggttttgttgtttgctcgcccggaacttattctgccagcttttcgaggttgccgttgcggtccattttgaacttagtcgcgccggtttcgtcttcttcgaaaaggacgtattttctcgcgcggttcatgattttcatcaaggtttcgtagtcttcctgcatggtaaccgaaccttcttcgagctcttggacacgttttttcaattcttccgtttcctttttcaattcctggttttcgtgcttcaatcttgcattctcactttttaaaatcgtgctttggaattgcgtattgttcaagtattgcagatagctgatgaccttgacaaggctcatatccccgttgctttcggtcggctgtgaaacttgcgggctgccgttttcagcttcttccccgtccggagccggttgttctggaaattcagcaagcggcatttcgccaatttcctcgagtgttggaaccggcggctggtacagcagtttctttttcccgccctggtcttttccaagcaggcgctggcgttgtttgcgctgtttttttgcaagctgcagcgcctgttcgtaattatggcggacaaccgcattccagcggaaaccgcaggcggcggatgtacggttcagcttatcgccgacttcctcaaaagcattcagctgtgtgcttccttcgcgcacgtggcggagcactgtttccgccagcaacaaatcatcttcttcgctccacgcatcttggcgtgatttcattctcattacccccaaatgtaaattttttgtttgtactaagagaatggacaaaaaacacgcaatttataccaatatggtaaaaaaataatagaattttagcgcgcaaacggatttttgctttcgacaacacagacaggcgggtacacgggggaagccaaaaagccccgttagcgtctgcccgggcacggataaatgcaaggggtttaaaaagcgcagccacacgctggcggggattggaaaatatggcaagaaagaacgggtttcctaattaaaatgtgcagcgccacaagctgtgggcatggagaccgccaatgctctccaaccacctggtcggtttaaaaagtgcagagtcaaagctggtgcgaaccgctgttttacgcttaccgcgcccggccggtgttaaaaaaatgcagcgccacaagctggttcccctatagaaactgtaaaatcaagcattttcgaaagaggcggtcttccatcggggggtattcattagccccgcgcatttccaaaagctgcccgtccgcatattacaagctttttttctcgggcttgtcccggtataatagaattacgacatcaggaagagggtaaagcatggaatacgccaaacgtaagctcagtgaggaaaaagtgtttaaagaccctgtccaccgctatgtccatgtgcgtgaccgggtgatctgggacttgatcggaacaaaagagttccagcgtttgcgccggatccggcagctcggcacgacttacctgactttccacggggcggagcacagccgtttcagccactcgctcggcgtctatgaaattgtcaggagaattacagatgatgtttttaaagaccgggtgaactggaacggaaaggacaggctgctgtcgctttgcgctgcgcttttgcacgatcttggccacggcccgttttcccattcgtttgaaaaagtgttcggtatggaccatgaggagtttacaaggcaaatcatcctcggggagacggaagtcaatgaagtattgcggcgggtcggcagaaatttcccgaaaaaagtggcggaagtgattgcgaaaacttcagaaaacaagctggtggtcagcctgatttcaagccagcttgatgcggaccggatggattatttgctgcgcgatgcgtactatacaggggtcagctacggccattttgacattgaacggctgctccgcgtcatgcgcccgcatgaagaccaggccgtttttaaatatagcggcatgcatgcggtcgaagattacattttaagccgttaccaaatgtactggcaagtgtatttccacccggtgacaagaagtgcggaagtgattttaacaaaaattttgcagcgcgcgaaaacgttgtacgatgcccgttatccgttcaaacacgggcccagccatttccaatcgctttttgaaggcaggcttaccctgcgagattatttaaagctggatgagcacatcatgctgtattatattgaagtttggcaggaagaagatgacccggttttgcgggatctttgcgcccgctttgtaaaccggaatctgtttaaatacattgagtttgacccggcaaaagaatttaaggtgcacagccggcttgaaaagctttttgaagaagccgggatcgacccgaactattatttggtcattgattcgtcttcagaccttccgtacgatttttaccggccgggcgaggaaggggaacggctgccgatcaatttgctgatgcgaaacggcgacctgaaggaattatcaagggaatcggatattgtggacgccatttcggggaaaagaagaacggatcataaattgtattttccgcttgatttgatcgaagacgaaacgacacacggggaaaagaaaagggaaattgctgctttgctgaaactgccccggagttcggaaatttagtcaggagtgaatggtttgtgttagaagatcatgtgaaaataatgggtgcgcttgccataagcggagagattgtcgggcgtaaaaagctgcaaaaaatgatttatattgcgaaaaaattatccttcccgtttcaggaaaaattcgagttccacttttacggcccgtattctgaagagttgacgctcaaagtagaggaactgaccaatctcgggtttgtaaacgaagtaaaagagaaaaaaggcggatatgtccagtaccggtatacggtgacagacgaaggccgggaatttctggaaatgtacgaaccggatctgccggggctagatgcgtgcttggcagaaatgaacgggcaaaatgcgcgtttccttgaacttgtttcaaccgtcatgtattttgacacgcttccgaaagaggaagtaaaagagaaaatctttacattaaaaccgaagcagcgttatacagaggaggaaatcaacgaggcgtacgattacatagaaaaattgaaaaaaatcgccaggcccgtccagcaggcttagcgattttttcacccttattcgtcgcttttgcggacgccgccgacagcataatggttttttgacatttcttcaataaaaacggtaatgttttctttcggggcgcctacggtttcgctgaccgcggccgttactttttcgaccagcgctttcttttgttcgtctgtacggccttccagcattttgacagttacatatggcatatggtgcatctccttttggatgttttcatttaaaaattgtaaagtcttttttgcccgcctgcaagtggcacttttaaaacaagtgaataccgaatgaaaattttgtatactatagtcaatatattgtttttaaaggagaccggtacgtggaacaattacaacagtttttggcatatccgttaagggatatcccgattgtcgcggcggtgctgatcattgcttttaccgtccatgagttttcccatgcttatacagcttatttgtgcggcgacccgactgccaaacgcgaggggcggctgacattgaacccggcgcagcatattgacccgcttggcgcgctgcttatttttgtcgccggcttcggctgggcgcgccctgtcccggtaaaccgctaccgtttcaaaaatccgcgcctggcaggggtggcggtatcttttgcgggccctgccagcaattttttgatggcgtttatcggggaaatcatcttttatgtgctggtggcaaccgggcttggcgcaggcctgccatggtttgtcctttcctttttcaattattttgtctggctgaatctcgtattgtttatttttaatttaattccgcttccgccgctggacgggtaccggatcatagaagatttggtttcgccgggggtacgggcaaaattgacgcagtacgagcagtacagcatcgttgtatttctggtcctgctggtcacgccgcttggccggtatacgatctcgccgctgcttaacagtgcggttccgtcgattatgaagggattccagaccattgtttccgtattcggatagattgccattgagagaaaggggatgtgcaagatggctaaagaaaagaaaaaggcagaatttaatattattaaaaatgcgccgactgacggccataaaagttttggcaccggggcgctgaaccttgaaaatgtctcgccggtgatcattgatgtcaatgaaggcacggcggttgtcgatattggggcgatgcatgcaaggagcgccgtggaaaaacgggtgagatttttccccgaccgttcggaagtcccggaagagggggcaaaaccgtactggcttgtgtgggtgacaattgaacgcggcgaaaacgggccttattatcacggggtgacagcctgcgaaatggtggtcaacaaggaaaaacgccgtggctacaaatcgctgccggaacatgtcaaccgcctcgacaagtcgatgaagggccatatcattgtagaccatatggacgaccggtccaaaaaagtgctggcagactttttaaaaggccacagcagcgagatgtggaacttatccagcgatgaattgaaagaagcattaaaggcctgaccccgcgcatttatttttgcgtaaggaaccggccgaaatttcacgatgcattgaaggagcaggaaaggcctgaccgcacagcggacaggcctttctgtttgctgttttaaaaaaacgggaacagtttttcaagccagttccggtgctttttcgggtacaactcattttctcctgcagcgggatgtttgctgcagggctcggccggttcggtaccggatataaagtatgtcagccttgccaccgggcagttagcggttgcgattttcccggtggcaggatcgatttcaacaccggttacgcctttgggcggcttaaattccgttacagggcgcccgtcaagcgccttttccataaaccgggcccatatttttttggcgtacattttatcggcggccaacgtgatttcctgcccgttgtcgtatccgacccaaacgcctgatacaagctggggcgaaaacccgatcatccagctgtccgtgttggtggagccggatttgccggcgtacgggcgggtgaggtttttgacaatggaggcgccggtgacacgggcatagccgttcaggcgcttgtcaaacatgccggtcatcatttgcgaggtgacaaacgccgccgctttgtccaacacccgttttttctcgtgtttgtcgtatgcatacaggacgcggcctttataatcttccacttttgtgatgaaaacaggcccgttttgagtgccgccgtttgcaagcaggctgtaggcgttcaccatatcgagcaggtgcacgccggatgtgccgagcgcaagtgacggcactttttccattggggttgtaaggccgaattgttttgcggtttggacaagcacatcctgcccgagcagcaaatgggttttcacggcgtaaatattatctgaaacggcgagcgcctgcatcatcgtaatgtccctattggcatactggctgttgaaattatgcggcctgtatgaagatccgcccggccggaaaacggtcggttcgcttttgagcatcgttgccggcgtgaatccgtggttcaatgcagcataataaaggagcggcttcatggtggaaccgggctggcgcgttgcctgtgtggcgcggttaaaggaactttccgcataatcgcggcccccggtaagtgcggttacgaagccgtttttcggattgattgccgcaaaaccgagctggatttgcgaagatgccggaatgatttccttcactgtttcttcggcaattttttgctgcttcacatcaagggtggtatatacttttaatcccccgagcgcaatcgtccggtcatcaaacccgagttttgttttcagctgttttttcacaaggtcctggaaataaggggcgatccggtttgtatccggatccgctttttgcatgatttttaccgtttcattagcggctgctgctgcttgtttttttgtaatatagccgtttttcaccatcgattgcaaaacagcaagctgccgttttttcgctttttccggcgaaatgacaggggagtagactccgggtccgtttggaatcccggcaagcatggcggcttcggcaagtgtcagctgtttggcgcttttcccgaaatagtaccggcttgcggcttcaatcccgtattttccatgcccgtaattgatcgtatttaaatagccttccagaatccggtctttgctgtagctggactcgagccggaccgtgtagaatgcttcctttaattttctttcccatgttttatcaagcgttaaaaacaggttgcgggcgtattgctgggtaatggtgcttgcgccctgcacctttcccattgctttcatatcggcagcgaccgccccggccatgcgccggtaatcaaagccgtggtgatggtaaaagtttcggtcttcgattgaaatggtcgcgtcaatggcgttttcggagatgccgtcaagcggcacccagtatctttgctggccgctgttcgactcgccgatttgtttgccgttttgtgcataataaagcgttgattgcggtacggacagcggcggcggaccgagaatttttgcatacagatagacagctgccgttaaggcagacagcaggatggcgaaagtaatcagggcaaacagtatcaggcgcaggccccatttggctttccggatctttggtgttgtctgtgtctccatcatccgcacctctttttctccttatttccttagtatttagtaagagaggaaattttaaacaccggaaccgaaaaaaggatgatgggaagggtggcccgctgtaaaaagattcttgctttttttcggaatttcactatactttttccatgtgtccgaaattgtgaaaaagaggagaaaaagatgagatttgacgaagcttattcaggccatgtttttatcggggcaagcccggattatgaaaaaagccgggtggtgctttacggcatgccgatggactggacagtcagctaccgcccgggttcacggttcggcccggggcgcatccgggaagtttcaatcgggctcgaagaatacagcccgtatcttgaccgggaacttgctgaaatcagctattttgatgccggagatatgccgctgccgttcggcaatccgcaaaaaagccttgatatgattgaaaattatgtcgggacattgctcgacgacgggaaatttccgttcggccttggcggcgagcatttggtgacatggccggtgatccgcgccgtttacaaaaaatacccggatctcgctgtcattcattttgatgcccataccgatttgcgcacggattatgaaggcgagccgctttcgcatgctacgccgatccggaaaacggcggagttgatcgggcccgcgaatgtgtattcattcggtatccggtccggcttaaaagaggaatttgaatgggcggaaagaaacggcatgcatatcgcaaagtttgaagtgcttgagccgctcaaaaaagtgttgccggcgctttccggccgccatgtgtatgtgacggtcgatattgatgtgctcgatcccgcttttgcgccggggacagggacggtggatgccggcgggatcacctcaaaagaactgctggcatcgattcatgcgattgcccgttccggcgtgaatgtcattggttgtgaccttgttgaagtggcacctgtatatgatcattccgagcaaacagccaatacggctagcaagctcgtgcgcgaaatgatgctcggctgggtgaagtaacggaaaacccggcaccggctgcgggggcgggtgccgggtttttaaagttaagcttgcgggatagcagctccattatatatgataaaatgaggagagttaccatattatttttccgccggaagggttataatggatgaaataaaggatgtgggaaaatggcgggggaaaccgtttcttgccctgtaaaaatacatatgaccacggagattttccaggaagaagcggaaaaaattgaactggttttgttcggccattattacgaaaaaggcggttcggcctatttaaagtacgaggaagtgcaggaagccggcaaaatttatacggttgtcaaaatggcaagcggaagggtgcttgtattgagaagcggtgcggtctccatgcggcttgatttgcgtgccgggacaaggcgcccggggacttacgaaaacggctatggccaattcccgattgaagcggcggcagatgagattgtgcacacgcgcacaggcccgctttccgggcagctttccctcggatacaggctttatatgcatgggggttcggtcggtacatataaaatgaagatccattatgaggaggtataagcagcaaaatgaacattgcggaacaaatgcaggaaacgctgaaaacggaaatcaaagaagcggtgatgaagaccggcttggttgcggaagcggatattccggctattgtgctggaaaagccaaaagaaaaagcgcacggcgattatgccgcaaacattgcaatgcagcttgcgcgtgcggcaaaaaaagcgccgcgccagattgcggaagcgattgtcgaacatatcgacaaatcgaaaacgtcgattgaaaaagtggaaatcgcaggccccggctttattaatttttatttggacaatacgtatttgacccggctgatcccttctatccttcacgatggtgcggattacggccgttcagatgccggcaggggcaaaaaaatccaggttgaattcgtatcggcgaacccgaccggtgatcttcacctcggacatgcgcgcggcgccgctgtcggggattcactgtgcaatattcttgaaaaagcagggtatgaggtgacccgtgaatactatattaacgatgccggcaaccagatccacaatctggccttgtcagtcgaagcgcgctacttccaggcgctcgggatggaaaaggaaatgccggcagatggctattacggccaggatattattgaccttggaaaaaaacttgccgatgaatacggccggaaatttgtggacgcggatgaaaaaacgcgctacgaatttttccgccagtacggcctcgattacgagatggcgaaactgaaaaaagaccttgaagacttccgcgttcgttttgatgtctggtattcggaaacgtctctttataagagcggaaaaattgacgaaatgctgacactgatgcgcgaaaaaggccatatttatgaaaaggacggggcaacgtggttccgctcgacggctttcggcgacgacaaagaccgcgtgctcatcaaaaacgatgggacttacacgtacttgaccccggatattgcttaccataaagacaaatttgaccgcggcttcgatacggtgattaatatttggggcgctgaccaccacggctatatcccgcggatgaaagcggcaatggaagcgctcggctataacagcggcaatcttgaagtggagatcatccagcttgttcacttgtataaaaacggcgaaaaaatgaaaatgagcaagcggactgggaaagcggtcacgatgcgtgaactcattgacgaagtcgggcttgatgcaacccggtacttctttgcgatgagaagctcggatacgcatttggactttgaccttgatcttgccgtttcagagtccaatgaaaacccggtttactatgcgcaatatgcccatgcccgtatttgcagtattttgcgccaggcggaagaaaaagggtttgtgccggatacaggcgccgatttttccgtgatccggtctgaaaaggaaacggatgtcctgaaaaagctcggagaattcccgcaggtgattgctgatgcggccgaaaagcggatcccgcaccgcattacaaattatattaacgaacttgccgccaacttccacagcttttacaatgctgtgaaagtgatcgagccggcgcatgcggacgccaccaaagcgcgccttgccctcgtgaaggccgtgcaaattacgctgaaaaacgcgctccagctgatcggcgtttccgcacctgaaaaaatgtaaagacaaaagccgtcctcatccgtttccgggttcagggcggcttttttttattaagatggtgtttcagttcagtgtcccagggaccggcttttccgtaagccggtggccgattgccgccgggtgtaagaaaagcaaattggattacaggcagcaagatagcccggggttcagtgcttttttcagtcaacgtgtggtaaatttaacgggcaacaaaatgcgttacagcccgcaagatggtattcaaggccggccaagcacccatcatccctcgcagtgtccccggtcttccggaaggcaatattttcctgattgcgccgactggcccagagccggctttttcatcacaaaaattcttcaattgccctcacgccccattcggccagcctcgttgccaatccggggcggttcaggtcgtctgatgtaagaggggcagcgtggcgcatatcatccttcacgaccgcgcacattttttggataaacacattgtcgtatacaaggcagttgacttcaaagtttaaacgggcactgcgccggtcaaaattagccgttccaatattgcagacggtccggtcaatgatcataattttcgcgtgataaaatccgggcttgaacaaataaatgtctgcgccattttcaagcagctgccggaaatagcggcttgcggcctctttgacaagcggatggtccgccctatcgggggtgagcactgtgacttttacgccgcgtgccaaagcctgcaccagttttttgtgcatggccggagtcgggataaagtacggggaaccgataaaaatcgattcacgggcttcatcaatcaggctgcaaaccaggtgctcaagctcatcgcccgcagtcgggatgatccggtggcggcatccgcttttctcctcatggggagagatgtgtgtttcaaatggcatattttctcctgtagccgtttcccagttcctgataaattcctcctgcaagtcgcggatacctccgccggttaagcggtaatggtaatctcgccaaggagacagcgacttgttgccattgatataatccttccccacattgaaaccgccaagatagcctgtcttcccgtcaatgacgattattttctggtggttccgctgctggagcgtgtaaaagaaaaaagggaacttcggccggttgtcgaaggcaaacgagacgccagcgtttttcagctgtgcaatcatctgttttgtgaccttccggctgcccacccaatcgagcaatacttttacttctttcccttcgcgcgctttttttgcgagcaggctgaaaaattcacggctgatttcatcattttttacaatataaaacaggacgtatatgctttttttggcatgcaggatatcggaaaagtagtggggaaacagattttctccgcatgtaaaaacagtaaaatctccgtgccgtacgggatattggcgctgtttgcgagttttgcggaaatgcctttttccaagcgtgtaatcggcgaaaagccagatgatgagtactatgacggcagaaaggaataagagcaaaatcatatcttttttctcccttcaatcgatttttttcgtggtcgagtccatgtctttatgcttccccaaatgcggccgattctacttacaaaagccggaaacaggcacaaagaaattcaaaaaaataaagaaaaaaggattgactgaatgctcattcattatataatataggtaagcaagattcggaaaattatctgcttttttgtgcgagcacgaatgaacgaagggagcgtcgggagaaaaatgcacatcttattatggttaaactggttgttgtttctttctgtaaccgcttacggcattggcctttttgcgtatttggtaaggacaaggatccagtatatcaaattggggaaaaaacaggaattcgacaacaatgtcaaggcgcggctcaaaaaaatatgggtatacgttttcgggcagaaaaaactgctcaaggataaaaagagcggcgccatccatgtgatgatgttttacgggtttattctcgtccagttcggcgcaattgatttcatatggaaggggcttgcgccgggttcgcacttgccgctcgggccgctttaccccggatttactttctttcaggaaatcgtcacgctcgtgattttatttgcggtcggctgggcgttttaccgccgctacattgagaagctcgtccgcttaaaacgcgattttaaagcggggcttgtgctcatctttatcggcgggctaatggtttctgtcctggtcgggagcggtatggaaatcatttggcactttgaggagccttcatggacggaaccggtggcagccgggattgcagccgcctttcattggatcgggcccaccgcggcggccgttgtgttttacgtggcatggtggatccatctgttgcttctgcttactttccttgtctatatcccgcagtcgaagcacgcccatttgattgcagggcctgcgaatgtgtatctgaaccggctcggggataccgggaaattacgggagatcgattttgaagacgaatcgcaggaaagtttcggcgtcgggaaaatcgaggacttcacgcagcttcagcttgtcgatctttacgcctgtgtggagtgcggccgctgcacgaatatgtgcccggcaaccggaacaggaaaaatgctttcaccgatggacttgatcattaaattgagggaccatctgaccaattacggcgcggccgttacgtccaaagcaccgtgggttccggcatttgcttttgccaacacgacagggaaccggctcgcccgggagagtgcaacccgcggggcagaagaggcagctgtagcgcttgattacaatccgagcctgatcggcgatgtcattaccgaagaagagatctgggcatgcacgacttgccggaattgcgaagaccagtgcccggttatgaatgaacatgtcgataaaatcattgatttgcggcgctatctcgttttgaccgaaggaaaaatgaaaccagatgcacagcgggcaatccaaaatattgaacgccagggcaatccttgggggctgaaccggaaagagcgcgagtcgtggcgtgaagggcgcgaagatatcgaggtcaagacggtcaaagaaatgaaaaaatcggatgaggaattcgagtatttattctgggtcggatcaatggggtcttacgacagccgcagccaaaaaatcgcgcagtcgtttgcgaaactgctgaatgaagcgggtgtgaaattcgccattctcggcaacaaggagaaaaactccggagatacagcacgcaggcttggcaatgaatttttgttccaggaactggctggccagaacatcgccgagtttgaaaagaacggcgtgaaaaaaatcgtgacgatcgatccgcatgcatacaatacgtttaagaaagaatataaagattttggttttgaaggggaagtgtaccatcacaccgaagtgctttatgagctgctgaaagaaggacgcttaaagccgaagtacgaagtcaatgaaacggttaccttccatgactcctgctacctcggcaggtacaatgacatttataaccagccgcgtgacattttaaaaatgatcccgggcgtaaagcttgtggaaatggaacggaaccgtgaaaccgcgatgtgctgcggggccggcggcgggttaatgtggacggaagaagataccgggcaccggattaatgtggcgcggactgaacaggcactttccgtgaatccgaccgtcatcagcacggaatgcccgtactgcctgacaatgctgtctgacggtacaaaagcgaaagaagtggaagacactgtgaaaaccctggatgttgccgaaattctggaacgttcggtctgcggggcaccggggcagactgctgcagtatcttaagcgggtgataccgccgcaaaacgggatgcgcggcagggaagctaacaacagttgtatgtaaaccggcaaatcatttgcgcaaaagcggcggggaacaggatatgcaaaaggaagattctccgccgtttttttgcggcagatcacacaggatgataagggttcgggaatgtaagcgcattcatattgccggcgcttttcataaatcacacagtaaggcaaggctcactgctgttttgggaaacgaacggcaaagggccatgaatgaacgatgattgagcgttcgctcgattggcgcttttcatccattccaaaagcatcgggaagttcgctgctgttttggcaacaaataacaaagggactatgaatgaacgatgattcgcgttcgtgcaaattgccggcgcttatcataaatccattgtaaaaggggagaagatggttgaacacggtgatcatcgacggggcgcgtacgccatttgggaaattcgggggaaaactggctgcacttccggcgtccgcgttaggcgggattgcgatccggcatgcattggaaaaagcgggcgttgaaaacggggaagtaaatgaagtgattatggggaatgtcctacagggcggccaggggcagctcccatcccggcaggcggcaaggcacgccggcattccgtgggaagtcaaaacggaaacggtgaataaagtgtgtgcttccggcatgaggagcgtgaccatggcggatcagatcatccgtttgggagacggggaagtcattgtagccggcgggatggagtcgatgtcaaacgccccttacttcctgcccaaggcaagatggggattgaaaatgggcgatgtccagctgaaagacatgatgacccatgacggactcatctgcgcattttccggcgtccatatgggcacatacggaaaccgcacggcggaagcgttcgggctgacccgcgactttcaggaccgctgggcattaagaagccaccagaaagcattggaagccatccattccggcaagtttgccgaagagattgttccggtggaaatcccgcaaagaaaaggccctgcgctgcttgttgaacaggatgaaccgccgcgcgcggatacgacgcttgaaaaactgtcccagctgccgcctgctttcgacaaagacggcaccatcacggccggcaatgctccgggtgtgaatgacggggcggctgcacttgttttaatgagcgctgaacgggctgcaaaagcagggttgaagccgcttgcaaagattgtggcgcatgcggaagtggcggtggaggcgcagcattttccgcagacgccggggcttgtgatcaacgaaatcctgaaaaaaacaggaagaaagcttgatgacattgatttgtttgaaatcaatgaagcatttgccgctgtggcccttgccagcagcaaaatcgcacagctcgatttggataaggtgaatgtaaacggcggcgcggttgcgttaggccatccgatcggtgcaagcggcacgcgcattattttaacccttgcatacgaactgaaacggcgcggcggcgggaccgggatcgcagccatctgctccggtggcggccagggcgatgccgtcatgattgaagtgcaataaaacttcaacgtgtatgaccacccaaaaaaggggacctgatcatggattttcagtttacggaagaacagcttttgctaaggaaaaccgtacgggattttgcagaaaaagaaattttgccggctatgggcgacatggagcgcggcatgttcccgcgtgaaatacttggaaaaatggcaaccctcggtctgatgggcatcaccattccggaaacatacggcggtgcggggctggattttactgcatacgttatggctgttcatgaaatttccaaagccagcgcgaccattggcgtcatcctttccgtccattcatccgtcgggaccgcgccgattttatattttggaagcgaagcgcaaaaacaaaaatatttgccaaagcttgcaagcggggaatacctgggggctttttgcctgacggaggccgaggcggggtcggatgcgaaaaatttaaaaacaaaagcggtaaaacagggcgggcattatgtgctcaatggttcaaaaatgttcattacaaacggcggcgaggcagatacgtatattgtatttgcccgcacggaagacggcaacatcaccgctttcattattgaaaagaccatgccgggtttccggaccggcaaggatgagaaaaaaatggggctgcacgggtcaaaaactgtccagcttcactttgaaaatctccaggttccggctgagaaccggctgggggaagaaggggaagggtttaagatcgcaatggcggtgctggatgccggccggatcgggatcgcggcacaggccctcgggattgcggaaggcgcctatgaactggcacttcaatacgcaaaaaaccggcgccagttcggaaaacccatccacgcatttgagggtaccggttttaaacttgccgacatggcaacaaacatcgaagccagcaaactgcttgtctaccggtcagcctttttgcggagcaacggcctgggctgcaaaaaagaagcggcgatggccaaactgctcgcttcccaaacagctgttgatacagcgattgaagccgttcagattttcggcggatatggatacacgaaagattatccggttgaacggttcatgcgcgatgcgaaaattacgcaaatttatgaagggacaagtgaaacccaaagaatcgtgatcagcaatcaattattgcgggagaaaaggctttaagttgtcttgaataaaaaaattggaggcagaaaaatggactttcgtttaagtgaagaacatgaaatgatccggaaaatggtacgcgattttgccgtgaaggaagtagcgccgacagcagcggaacgcgatgagaacgaacggtttgaccgtggcatctttgaccggatggcggcgcttggcctgaccgggattccgtggccggagcagtacggcgggatcgggagcgattttctggcatactgcattgcggtggaagagctgtcgcgtgtgtgcgcctcaaccggcgtgaccctctcggcacatacttcccttgccagctggccgctgtttaaattcggcacagaagaacaaaaacagaaatacctcgttccgcttgcccgcggggaaaaaatcggcgcgtacggcttgacggagccggggtcgggttctgatgcgggtgcgatggtgacaacggccaggcgtgaaggagaccattatgttttaaatggttccaaaattttcattacaaacggcggcgtggcggatatttacatcgtgtttgccctcaccgatccgaaaagcaaacaccatggtacaagcgcatttatcattgaaaaagattttcccgggttttcaaccggcaaaaaggaaaagaaaatgggcatccgggcttccaccacaacggaaatcatttttgacaatgtcatggtgccggcagaaaaccggctgggggaagaaggacagggctttaaaatcgcgatgatgacgctggacggcgggcgcaacggcattgcagcccaggcagtcggcattgcccagggcgcgctcgatgcggctgcagcttatgcgaaagagcggaaacagttcggcaaaccgatcgcagcaaaccagggcgtgtctttcaaactcgccgacatggccactgcagtcgaagcggcaaggctgttaacgtaccaggcagcctggcttgagtcaaacgggctgccgtacggaaaagaatccgccatgtccaaactgtttgccggcgatacggcgatgaaagtcacaacggaagccgtgcagatttttggcggctacggttatacaaaagattatccggttgagcggttcatgcgcgatgccaaaattacgcaaatttacgaagggacgcaggaaatccagcggcttgtcatttcaagaatgctgacaagggactgacggagaggggaggccgtttgtgagccaaaaaaagtttgtgccggcatcggtcagggacgaaaggctgattgaaaagcgcagaaaccaaatgatcaatgccgccgtcgcgctttttaaggaaaaggggttccaccggacgacaacgagggaaattgccaaaaaatccggctttagcatcgggacgctttacgaatatatccgggcaaaagaggatgtcctctatttggtgtgcgaccggatttatgatgaagtgcgcgacaggctgctgcgcattgatgccggccaggggacgcttgaaagtttgaaactcgcaattgcccattatttccggattgttgatgaactgcaggatgaagtgcttgtcatgtaccaggaagcaaaatcactgacaaaagaagcactgccttacgtattaaaaaaggaaatggaaatggtcggcatatttgaaaaaatgattaaaagatgtgcggaaaacggcgaacttgatctggaagaaaaagagattgagatgctcgcccataatatttttgtccaaggtgaaatgtgggctttccgccgctgggcatttaaaaagaagtttacaattgaggattatatccgtctgcaaacccatttgctgttttccggccttgagacaaggggtatgatggcataaatttttggcgccatttccgtttttccatcccggggttcattcatgtgttttaagttccaatcctgatgaagacaagggggatatgatggctgaaacagaggtttaccgcccgaaacatgcggtccgttttgtcacagcgtccagtttgtttgacggccacgatgcttccatcaacattatgcggaggattttgcaggcaagcggcgcggaagtcatccatctcggccacaaccgctcggcacgagaaattgtccaggcggcgattcaggaagatgtccagggtattgccgtttcttcctatcagggagggcatcttgagtttttcaagtatatgtatgatttgctgtaggaaaacggcgcctccgggatccgcatttacggcgggggagggggcgtcatcatcccgcgtgagatgaaagaactgcatgactacgggatcgcgcgtattttttcaccggaggacggcagaaagctcggccttcagggcatgatcaatatgatgctccgggagtgcgaccacccgacggtaacggaagcggattttgccaaagaagccgggcgcttaagcgaagggcggatcagttctgttgccaggctgatttcttatgccgagaaccatttgaaccatcaggaggcgcttgctgcccttgaatctgccattccggccgtgaagaaagcgctgttcgtgggcataaccggtaccgggggagcgggaaagagttccttgacagatgaactgatccgccgctttttgcatgaccatccggaaagtaaaattgccgttctttcggtcgacccgacgaagcaaaaaacggggggcgcattgcttggcgaccggatccggatgaatgcgatttttcatccgaatgtatttatgcggagcctggctacaagggcatcccgttccgaactttctcttgctcatgatgctatccggattgtaaaggctgccggctttgatttgattttgatcgaaacaagcggaatcggccaggtggatgccgaaatcacgaatatttccgatgtcgcaatgtatgtgatgacgagcgaattcggggcgccttcccagcttgaaaaaattgatatgatcgattatgcggacctcattgtcataaacaaatttgagcgcaaaggttcagaggacgcgaaaaagcaggtgcaaattggcggatagatggtttccaagttctaagttgtgttcttgctgcggaaaacttaaaaaagacttgaagttatccgatagaacttttgaatgcggatgtggaaatattgttgaccgagattatcaagcgtctataaatcttaaaaaatatggtgaaaatgttttagaatctgtattttaacaatgcaagttaatgtagacatgtaccgattcgttagttgggaatttacgactttggagtgttacaccaaatgcaagtagcgatctgtttaatagatagacgtgaaagcagacacgatgaagaagtaaggaaacataaaagttgtaagaaattacaattttttataagttttctgtaacggcggttatattctaaaaggcgacagtaactctggtggaaaatccgagctttaaaaaaatccaccttattatcaacgacaatggaaaatcgggatgctaagctgaacgacccaaatagcattttccgctaggagtcgccgctggacaaaaatgcagcgtgtgcttccaaaagcaaaaaaccggcagctaaatgccggctttttgctttcgctcaatggcaagtacgaaaataaattttctttccacatagaattctgttgtttctttctgccagatggatgtaaaatggacaaggatataggagatgtgcttgaataggcggaaggtgggagtaggactcgtcaatcgcttattttttcaagggatgtggactgtttgtattcttttatcaaaattttactatcatgcagcggtatgatcgtttttttgctggccgggtattatttatacagtaaagaactcggcgccatcccttttctgctcctctcgttttttctgttttatcttgcataccggctgatgaggacgccgggccgcttaaaaacccgggataaaaacagccggaaaaggccgcggggctagcataaacgtttgctttttgtatataatgataaatatgttttctattaaatcatgcaaagtttagcatttacctgccatatagcagttttgatcaatgagaaagggtgtgcgacgcgtgagcttgcgacagttgccgaaagaagagctgaaggaaatgtcttttatcgagttggcggaacaaatattggaggaaaaaaaacaagtgacttccttccaggacttgcttgcggaaatcggcgccattttggggttgccgaaagaagaaaccgaaagcaaaatgatccagttctatacggacttaaatattgacgggagatttatcagcctgggggacaacacttggggtctccgtgcctggtacccggttgaccagattgacgaagaagtgacccacaccgtgaaaacgaagcggaaaaaagcgaaagttgtcgaggaagaagaggactttatagatgatgaagaccttgaccttgaggatatcgatgatgtcgccgaagatgaagaagaggacttcgccgacgaagacgaggaagacgaagacctggtcgaagacgaagatttggttgacgatgagttttccgatatcgatgaagatgaagaagaaactttcgaagacgaagaactgctcacggatgatttcgacgttatcgaagacgaagacgaggaagacgttaacgacaaagaagattagtcttgacttctttccgggacaacggtagtattatgtttgggctcctttgagaaggacggaatatcgcaaaataaatcaagctcccccttgcaacccgtattgcaagaggggctttttgttttttacggggcagatccggagaacggaccggaacagatccggctcttaaaaatggatgaagccatgtattggggcaacaataatgttacattacaggaggggacaacacgtgacaaaatatatctttgtaactggcggggtcgtttcctcgctgggaaaagggattactgcagcatcgctcgggcggttgttgaaaaaccgagggctgaatattacgatccagaaatttgatccgtatattaatgttgatccgggtacgatgagcccgtaccagcacggggaagtgtttgtaacggacgacggcgcggaaaccgaccttgacctcggccattatgagcgttttattgatattaacttaacaaaatacagcagcgttacgaccggcaaagtttattccgaagtcatccggaaagaacgccgcggcgaatatctcggcggcaccgtacaggtcatcccgcatattaccaatgaaatcaaagaacgcgtctttcgtgccggaaaagtaaccaatgcagatgtcgtcatcacggaaattggcgggacggtcggtgatattgaatcacttccgttccttgaagcaatccggcaaatcaaaacggatgtcggcattgacaatgtcatgtacatccattgtaccttaattccttatttaaaagcatcgggcgaaatgaagacgaagccgacccagcatagcgtaaaagaattgcgcggcctcggaatccagccaaatgtcattgtcgtccggacggaaatgccaatctcgcaggatatgaaggacaagattgcattgttctgcgatatccagccgcgtgaagtagtcgaatgcatcgatgccgatacgttatatgccatcccgctcatgctgcaggagcaaaaactggaccagcttgtttgcgaccatttaaaactgcagtgcccggaagcagatatggccgaatggagagggcttgttgaccgggtgcgcaatttgaaaaagacggtgaaaattgcgcttgtcggcaaatatgtggcactccaggatgcctatctttccgttgcagaagcgctcaaacatgccggctaccagtttgatgcggatattgatattgacatgatcaatgccgaagaggtggacggggaaaatgtggcggacctgctgaaagacgcggacggcattttagtgccgggcggtttcggcgaccgcggcatcgaagggaaaattcttgccatccagtatgcccgtgaacataagattccgtttctcggcatctgccttggcatgcagcttgcatcggtcgagtttgcccgccatgtcctcggattgaaagatgcgcactcctcggagatcaacccggatacgccttatccggtgattgaccttttgccggaacaaaaagaaattgaagacctcggcggtacgcttcgcctcgggctttatccttgccggcttgtgaaaggcacgaaagcgtatgaagcttatcaggatgaagtcatttatgagcgccaccgccaccgttatgaatttaacaatcaattccgtgaacgcatggaaaatgccgggttcacgttctcggggacaagcccggacggccggctcattgaaattgtggagctgaaggaccatccgtggttcgttgcttcccagttccacccggaatttacctcgcgcccgacacgcccgcagcctttgtttaaaggatttattgaagcgtcgatcaagggtaaacaataaacctgtacccttcggaaaatgccccgttttttccggaggtactgataaaaaagcggcgggaagccattgtatttggtttcccgccgcttttttgcatcccgttttctttgaatgcaaaagcccggaaatttttccaggcttttttataaaaatccattgacggagaagtgtatgaacggtatgatacacatatcagctgtatcaatgtattaatacgatcattttggcgtttgtgtatgaagggcttcatacacatggagagatgaaaaaggatgggggcgattcagatcatcgcagagattaaatggaataaccgcgatcctgtctacattcaggttatccgttattttaaaacccggattgcgtcagggagccttgaggcgggacaggaaattccatcgcggcgcgaacttgcagccatgttaaaaatcaatccgaataccgcgcaaagagcgtataaagaaatggaggagcaaggtttgatccacacagaacgcaatcttccgagccggattacaacagaccgggaagtgcttgccggggtacgggaagaactgatccagtcagcattggctgattttctagattcgatccgcccgatggatattccgctggaggagctgttggagctggtaaaaaggcaatacaggggcaaagggggggccgggcatgattgaagttatggaagtgacgaaaaaatacgggcggaaaaaagtgcttgattcgctttcttttacagcagaaaaaggggaaattacctgtttgatcggggtgaacgggaccggcaaaacgaccactttaaaagcgattgcagggcttgtcccggtcagcaaaggaaagattctgatcgacggggaaccgtacaacaaacatatttacgaaaagctggcattcattccggatgcgcccatcatgctgccgcggatgaaaatcaaagatgtcattctttttatgcgggatttctatccggattggaatgccttgcgcgccaaggacctgtttcactttttcaagttgaatgaaaatgaccggatcggtgagctttcgaaaggaaacatggcaaaagtgaatttgctgctcgggctatcactcgatgtcgattacgtgctgatggacgaacccttttcgggcattgacattttcagccgggagcaaattgcagatgtgttcgcaagcggcctggttgaaaaccgcggtgttttgattaccacacatgaaatcaatgatattgagcacttgctggacaaagcggtgctgctcggggacgggaaggttttaagggaattttacacggaagacatccgcagcagcgaagggaaatccgttgtcgatattatgagggaggtataccggcaatgaaaagttttgtaaaacttgtaaattttgaaatcaaccgttttgcgaaaatctactggtctttggttgcaatcaccatcctttcacaatttacgtccgtttttttgacggtgcatcgttatatcagccaagcaaatgggatcgtatatcaccagtcactgcccactgcccaactggcatacgtaaagcattatggttcgatcagctttatcgactgctttggtacggtttggttcatggggccgattgcgctttgtgcggcggccatgatgttttatatcttcctgatttggtacagggactggtacggcaagcatacgttcatttaccggcttttgatgcttcctgttgaaagatggaatctctatttggcgaaagcggcgagcattttgctgttggtgtttggatttgttgctgttcagattgttttactgccggttgaacatttcttttttaatgccattacaccgggcatttacaggatggatatgacggtcatagatgctgtcttaagtttcccttattttaacctgctgcttcccggtgcagcgatagattttctcttccattacgggttaggatttacagtggttcttgtaatatttacagcaatcttattggaaagaagtttccgcatgaaggggatcctgctcggcctgctgtacggctttctctcgttcgttttattttggacgccggatttcctctttgaagtgttgctgcccggggttttgcaccagcaggaattattatggattgaagtggccacgactgccatcattgcggggtattccatcctcctggggggatacttgatcaaatacaaagtaacggtgtaagggagagatacgatgagacgttatttaaatttattggtaattctggttgcggttgtggcggcgatcccccttttttacaccgcattggccgctggcaaggatccgggccttgtgctgaaaagggtaagcggaaatgaaaatgaaatcccgaatgttaaaattactgcgatggatagccaggaaaaccgtttgaatcgcatgttttccattacttcatccgggagccacgatttaagaagggagtcttcttttttgtcactggatgaagatccggcttggtacaagcagtatgtcaaacagtatccccgttatatgagggggaaaaccgaccaaggcggcttttatgaagataaacaaatgattgcttatgccgaaatcaagccgcagccgcttcaccggtcccgtgtagcgctgtatgtcggggtgctggataagaaaacgaagaaaataaaaacgatgaagatgaaggtaccgggttttacaaaacaatcttatccatcggtctgggatgtgcaaaaaaccggaaacgagctgaaagtagcggcagggatggatacaggtatccgcgtgtatcgtgtcagcctgccggaaaagaaaataaccggggataaagtgattgcacaaagagaacaggctgggagaatggcccaatatacccagctcgcagaaaccgacgtgaacaagcccaaccatatactggcatatcaagaagagaaagtggacgacgacggtacagtaaaggaaatgactacctttatttacaattaccatacaaatgaaacgaaaaaactcaggttgccaaaagacatttcgttgcgggacagcgataactggaagtttgtttacaacgggaagacggtttatatggcaattacaaaaaagaacggaggcgcgcgccttttaacctttgacgggaacggaaagctgaaagcagacaagacatttgctatcaagtaccagagtacgggcaaccccatccctgaaatcaaaaacggcaggttgtacttccttatcccgaacgattcccgggaaaaagcgtgtctcctgtatgtgttcgacatttcaagcggcaagcagttgtacagcggaaaagtggttcaaaaagggaaaggagtgaaagcccggtatgtggagggagttgagttgacgataaaataaaggggccctcccccttattttatcaccgcttttccgcgtctttcggaatccgtctgtgatcattgaatttgccacttgcataagcaggaaaaaagcaaccgggagtagaaatagttttacatatcataaaggcaagtgggagttaccaaaagtacatacaaattttggtaaaaatgatcatgtgacggagggaaaaaatgagagagccgaatattttaattgttgacgaccagtttggcatccgggttctgcttacggaagtgctgcagaaagaaggctatgaaacctttcaggcggcaaacggcccccaggcgctttccctggctgcaaaccatgaaatcgaccttgtcctgctggatatgaaaattcccggcatggacggcattgaaattttaaaaaagctgaaagaaatgaacccggatatccgggccatcattatgaccgcttacggcgaactggatctgattgagaaagcgaaggagctcggggcgctgacccattttgcaaagccgtttgatattgacgacatccgcaaggcagtgaaaaaatatttggcgatgtaagcgcatgaagtgaaaaaagtgctaaaccgtaaaattttgataattttatttctttttaccgacaaataaagttcattggtaaatcccggttttgtttgttatgattgttaaggaatgatcaataggctagtatgatgttatcaagattgtatatcataaaaatgataacctcgggcaatctttttaacgcaaatgataaggaggaaaattcatgcctttagtttccatgactgaaatgctgaataaagcaaaagaagggaaatatgcggtagggcaattcaacgtcaataaccttgaatacgcccaggccatcctgatggctgcagaagaagaaaaatccccggtcatcctcggtgtttccgaaggagcagcccgttacatgagcggttttaaaaccgttgtaaaaatggttgaaggattaatggaagacttgaatgtcacggttccggtcgcgatccatcttgaccatggttcaagctttgaaaatgcaaagaaagctatcgatgcaggctttacttctgtaatgatcgacgcttcccaccatccgtttgacgaaaacgtggaaattacttctaaagtggtggaatatgcccatgcccgcggcgtatctgtggaagcagaactcggcactgtcggcggccaggaagacgatgttgtcggaaaaggcatcatttatgcggatccggaagaatgcaaaaaactggttgacgcaaccaaaatcgatgctttggcgccggctcttggttcagttcacggcccttaccacggcgaaccaaaccttggcttcaaagaaatggaagaaatcagcaaaattaccggcattccgcttgtgctccacggcgggacaggcattcctgaagctgacatcaaaaaagccatttctttaggtactgcaaaaattaacgtgaatacggaaaaccaaattgcttccgcaaaaacggttcgtgaagtattggccgctgatccggatgtatacgatccgcgcaaataccttgggcctgcacgcgaaacgattaaacaaaccgttatcggcaaaatccgcgagttcggttctaaccaaaaagcatgattgttttagattaaccgtgaacacgcaatgccttaaggatgggtgttcacgataaaaaagtctggcgctgccccgtgcgtgccgggcttttttggttgctttaaaatacgggcggctttaagcgttttacctttgtgcttttttcgggaaaccggttcaaacgcccggaacaagagggtttgcggccgttttttgggtaggcgcctgtgaaaaaaatggttgtttttctgaactttcttttcgttccgtggtatagtggaaatggatacataggaaccataaaaggagatggaagcagaatgaaattttttattgatactgccaatttcgaggaaattaaaactgcaaatgaatgggggattttgtccggtgtaacgacaaatccgtctcttgtggccaaggaaaatgtttcattccatgaccggttaaaagaaattacggcgctcgtgcccggttctgtcagtgccgaagtcgtgtccgaagatgcggaaggcatggtaaaagaaggaaaggaactcgcggctattgccccgaatattacggtcaaagtgccgatgacgccggaaggaatgaaagctgtccatcaattggcacaggaaggcatccgcacaaatgtcaccctggttttcagcagcaaccaggcgcttttggcagcaagagcaggtgcaacttatgtttcgccgttccttggcaggctggatgatatcgggcatgacggcattcatcttatttcagagattgccgaaattttttccattcatcaaattgatacggaaatcatcgcagcttcgatccgccacccgcagcatattacacaagcggcgctcgcaggggcgcatatcgcaaccgtcccgtttaaagtgctcacacagctgttcaaacatccgttaacggataaagggattgaacaatttacacgcgactggaacagccgtacagaaaaataacggaaatatttaaaattgctctttatttcttgctttctccggggcagtttgattttccgcctgttcggcaatcctgttgctgggattcatattgttttacggagctttcggaccagtttgcgaacggccatttacaaccggaatgtacatccatacccgctaaagaagggagcttaatatggaaaagctaaaaattgccgggggatatcctttgaaaggcaccattaaagtgagcggcgcaaaaaatagcgctgtcgctttaatacctgcgaccatcctcgcggaatctcctgtaacaatagaaggcttgcctgaaatttccgatgtccggacattgaccggcttgctggaagagatcggggcaacggttacgtcagaggacggggaaattacggtggatccccgccatatgatctcgatgccgctgcccaatggcagggtgaagaaactgcgtgcctcatattacttgatgggcgcgatgctcggaaggttcaaaaaagctgtcatcgggctgccgggcgggtgccatctcggaccgcggccgatcgaccagcatattaaaggctttgaagcattgggcgcaaaagtgacaaatgagcagggtgccatctatttaagggcggatgaattgaaaggtgcccgtatttatctggacgttgtcagtgtcggagcaacgatcaatattatgctggctgccgtcaaagcaaagggaaagacagtcattgaaaacgctgcaaaagaaccggaaatcattgacgtagccacacttttgacgaatatgggcgcaaaaattaaaggtgcgggaacagatgtcatccggattgaaggcgtggaccatttgagcggctgccggcatacgattatcccggacagaattgaagctggtacgtttatgatcctggcggcggcggcgggtgaaggggtactggttgacaatgtcattcctcatcatctcgagtcgctgaccgcaaagctcagggaaatgggcataccggtggaaaccggggatgaacagatttttatcggaaaagcagacaagctgaaaccggttgatattaaaacactcgtttatccggggtttccgacagatctgcaacaaccgttcaccacgcttttgacaagggcagaaggcacgtctatcgtaaccgatacaatctattccgcccgctttaaacatattgacgagttgcggagaatgagcgccaatattaaagtggaaggacggtctgcgattgtcaacggcccggcccggcttcagggggcaaaggtaaaagcgagtgatttgcgtgcgggtgccgcccttgtcattgccggcctgatggcagaaggggtgacagaagtcacaggggtcgaacatatcgaccgcggatacagctgcctcgtggaaaaattaaccggtcttggtgccgctgtttggcgggaaggcatgtccgaaaaggagatggaacacctgaaccattcctagcgggcaattgccggctcccccataaatagaaaaaaaacggataaattatgacacaataattttttaaatgtgttatactaattaaaaatctatttatgggggtagtaaaattggaaagaagcttgtcaatggaattggtccgtgtcacggaagcagcagcacttgcatccgcaagatggatggggcgcggattgaaagatgaagcggatgatgcggcaacgtccgcgatgcgtgatgtgttcgacaccattccgatgaaaggcactgtcgtcattggcgaaggggaaatggatgaagcgccgatgctgtatatcggggaaaaactcgggaacggatacggcccgcgcgttgacattgcagttgacccgctggaaggaacgaatatcctggcatccggcggctggaatgcgctcagtgtgctggcgatagcagatcacggacatttgctccatgcgccggatatgtacatggataaaattgctgtcggccctgaagcagtcggcatgattgatattaatgcaccgattatcgataatttaaaggctgtggcaaaggcgaaaaataaagatatcgaggatgtggtggcaacagttctgaaccgtccgcgccatgaagaaattattgcgcagctccgtgctgcaggcgcccggatcaaactgatcaatgacggggatgtggcagctgccattaacacggcattcgaccataccggtgtagatattttgttcggatcgggcggcgcgccggaaggggttatttcagcagttgcgctgaaatgcctcggcggcgagatccagggacgcctcctgccgcaaaacgacgcggagcaagaacgctgcctgagcatgggggttgacatcaataaagtgctgatgatggacgaccttgtgagcggggatgacgccatttttgctgcgaccggcgtaaccgacggggaacttttgcgcggtgtccaatttaagggccagtacggatccacccattctgtcgtcatgcgtgcaaagtcggggacggtccgctttattgaagggcagcacagtctgaagaaaaagccgaaccttgtgatcaaagcgtaaatctccgggggaacatgcagctatagcggcgggggaagggcggaagtgccgccttccctcccattttcaacaaagttttttacctcttatgctatttttagttgatttctcttctgtttcagggttaaaatgattatggttttgtttataaatattcaattgtttgtcttctttttcttccgtacatggtgcggctccatagatgcacgtgctgcaacattgcctctttgcagacagctcatgttttctatctatgcgcaaagcaaaactgtggatgttcatatcttgccttcacattcctttatttttagcctgttctgttccattggtataccggtatagttttaagcgccgggaacaaatggaaaattttgatgtaacggaagaaacagcctgctctacccgactgtaaattgaaaaagtgtggtgtttttatggaaagtttatcaatatcaagtctggaaaatatgacgttaaaagagctttatgcccttgcaagagagtataaagtatcctactacagcaaactgacgaaaaaagagttaatttttgcgattttaaaagcacgggcagagcaagaagggtatttctttatggaaggcgtgctcgaaatcatccagtcggaaggattcggattcctgcgcccgatcaactactccccaagttcggaggacatttatatttctgcttcgcaaatccgccgctttgatttaagaaacggcgataaggtttccggcaaagtccggccgccgaaagaaaacgaacgttattacggcttgctgcatgtggaagcggtaaacggccaaaacccggaaaccgctaaggaacgggttcattttccggctctgacgccgctttatccgaaccggcagattatccttgaaacggctcccgaaaaactgtccacccggattatggatttaatcaccccggttggtttcggacagcgcggtttgattgtggcgccgccgaaagccggtaaaacgatgctgctgaaagaaattgccaactctattaccgtgaaccatcctgatgcggaattgatcgttctgttgattgatgaacggccggaagaagtaacagatattgaacgttccgtgcatgcggatgtcgtcagctcgacctttgacgaagtgccggaaaaccatatcaaggttgcggaactcgtattggaaagagcgatgcgccttgtcgagcataagcgcgatgtcgtcattttaatggacagcattacgcgcctcgcacgcgcctataaccttgtgattccgccgagtgggagaacgctttcaggcgggattgacccggctgcgttccatcgtccgaaacggtttttcggggcggcacgtaatattgaagaaggcggcagcctgacgattttggccaccgcgctggtcgataccggttcacgcatggatgatgtgatttatgaagaatttaaaggcaccgggaacatggagctccatcttgaccgctccctcgccgaaaagcgcgttttcccggccatcgacatccgccgttccggtacaaggaaagaagaactgctgctttcgaaagaccatctcgaagtactgtgggcgatccgcaaatcgatgtccgattctccggattttgtcgaaaaattcttgcgcaagctgaaacaatccaaaacaaacgacgagtttgtggaaatgatcaaagcagacttgaaagtatcatcgtcaaggcgtgtaatataaggaaaaataaggaagaactttttttctggcagtgatgttgcatttccactccggacttgttataataatgacagtgtgtttatgaaattttacagggcgtgtcccgtaaaacaatagaactctgtttcgcaatgactcagggctgaaggagatgaaaagcatgaaaccaggaattcatccggaatacaaaaaagtaatggtcaaatgtgcgtgcggaaacgaattcgaaagtggttccgtaaaagatgaactgcgcgtggaagtatgttccgaatgccatccattctatacagggcgccaaaaattcgcgactgctgacggacgtgttgatcgctttaataaaaaatacggacttaaataaaagaatccatgaaaaacaggcgatgcgtttgcctgttttttttatgggatgccggcttgcccggacggatttttcaggtctaaaaaccatatttgttgaaataaggagcggggatgatggcacagctatttttcagatacggcgcaatgaacagcggcaaatcgattgaaatcttgaaagtcgcccataactatgaagagcagaataaaccggttctcatctttacatcgggcatcgatacgcgcgatgaagaaggctatatttcgagcagaatcggcttgcgcaggaaagcgatcccgatttacgatgatacggatatttttgaaatggtgaaagggtacaatcccgcgccatactgcgtcctgatcgacgaagtccagtttttgaaaaaaaggcatgtgctgcagcttgcccgcattgttgatgatttgcatatcccggtaatggggttcggccttaaaaatgattttcaaaatgagctttttgagggcagcaagtacatgcttttgtatgccgataaaatcgaagaaatgaaaacgatctgctggttttgcgaacggaaggcgacgatgaatttgcgcgtcgacgagaacgggaagccggtgtatacaggggaccagatccagattggcgggaacgacacgtattatcctgtttgccgcaaatgccacgaccatccgccgctgtgacggcatgtgatgcataaataaacctccatccgaagggaaacctactggaaaaggaggttttttttatggcaaaacagctgattttcctctgcttaatgatggtgctttcaggttgcacggcccaaagccggacccgtgaagctgcgccggatcgcattgaaacgaagccgttaagcacggcggatacgcaaaaggcagggcaaagaaacgggaatgctggtggggcagctgctgtaaatgcggatatcgagagggtgcgggaagcggtttggaaaatggacagtgctgtcccccattcggtatatgtgaacgggaaagatatgtgggtcaatgtccatacggaggaacagctgaaccacagggaaagaatgaaaaaagcggcggacatccgcagccggcttttgaaagtggcgccccgctacgacattcatgtccgaatagacgtgaaataggaaaaggcgtttcagcagcgctgctcccatgttccgctttaagtttccccgtgcgtatactataataaatttgttatgtctgaagggcgggttttgctgttaccggaatgggaatacgttgtgaaatgaggtggggttcgatgttcgatcggttgaaggccgtggaagaccggtacgaaaagctgaatgagttgttaagtgatcctgagatcgtcaatgatccgaaaaaactgcgggagtattcgaaggagcagtcggatttgcaggaaaccgtgcaggtgtaccgtgaatataaagaagtgcagaaacagctccgggatgcaaagtcgcttctgtcggaaaaactcgatcctgaaatgaaggacatggtgaaagaagagatccatgaactcgagtcaaaaatcccggaatacgaagaacgcctgaaaattttgcttctgccgaaagacccgaatgacgaaaaaaacgtcattgtggaaatccgcggggctgccggcggggatgaggccgcgttgtttgcaggcgacctgtaccgtatgtacacgcgttatgccgaatcgcaaggctggaaaatcgatgtgattgaagccaatgtcacggggatcggcgggtacaaagaaattgttttcatggtgaacggcaagggcgcgtattcaagattgaagtttgaaaacggggcccaccgggtgcagcgtgtgccggaaacggaatcgggcgggcgtatccatacgtctacggcaacggttgcggttttgccggaagcggaggaagtcgaagtggatatcaatgaaaaagatatccgcgtcgatacgtttgcatcaagcgggccgggcgggcaaagcgtcaacacgacgatgtcggctgtgcgcctgacccacattccgaccgggattgttgtgtcctgccaggatgaaaaatcgcagatcaaaaataaagaaaaagcgatgaaagtgctgcgtgcccgcatttatgataaatttcagcaggaagcgcaggcggaatatgatgccaaccggaaatccgccgttggaacaggggaccgttccgagcggatccgtacgtacaattttccgcaaaaccgtgtgacagaccacaggatcggattaacgatccaaaagcttgaccaggtgcttgatggcaaactcgatgaaatcattgatgcccttatccttgaagaccagtcaaaaaaactggagagtgtgaatggctgatggaaaggaacataaaagtgtatgaagccttaaagtgggcttcttcttttttaacggaaaacggccgtgacgcgaatgcgggtgaacttttgctcgggcattttctggatatggacagaacccgcctgctttccaacttgcggatggctttgcccccggatgcgggggtgaagttccggcaagcggtagaagcccatgcaaaaggggttccggtccagcatatcacaggctacgaatacttttacggccggaaatttcttgtcaaccgggatgtgctcattccgcgcccggaaacggaagagctggtgcagggcgcaatcggacggatccgccgccatttcggggaaacaaaagggcttacattggcagatatcgggacaggcagcggcattatcgcaaccacaattaaattggagttgccaaagctttttgtgtacgcatccgatatttcggaaaaagcgcttgccgtcgctgaaaaaaatgctgaagccctgcatgcggatattcggtttgtgcacggggatctgctccagccgttcatgggcagcaaaaaattggacattgtgttatccaatccgccgtatatcccggaaacggaccgcagctcgttatccgttgtggtgcgcgatcatgatcctgaaacggccctgtttggcggagaagacggccttgcattttaccggcgcttggtggaaaccttgccgtatgttttaaataagcgggcgctcgtcggttttgaaattggttcaggccagggggaacgcgtttcctgcctgctgcgggatacgttcccggaaagcgttgtggaagtggtccgcgatctcaacggccatgagcggatggtattttgcgaaaaaaattagatttttttcagattcatagtttaaaatcccctgttcctgcccacaatgagaatacgaagggacggggagaagaaaatgaaaagaaaaacagtggtatcattgtatattttcatgttatcgatcgcaacgatcatcagtttatatgcaccgaaacaaaaagcggcggaggctgaaaccatcgtcattccgaaagacgcgatccggctgcggattctggcaaacagcgacaagccggaagaccagggggtaaaacggaaaatccgcgatgaagtgaatgcgaacattaccaaatgggtgggccacttaacgtccaaaaaagaagcggaaaaagtcatccgttcccgcttgccggaaattgaaaacattgcaagaagggtgatggcggaagaacacctgaacgaaccggtcaaggcagaacttggaaaggtcgcctttccgacaaaattatacggccagtacttatatccggccgggaagtatgaagcagttctgattacgcttggggaaggcaagggcgccaattggtggtgcgtcctgtatccgcccctctgttttctcgatttttccaacggcgttgcaacaagtagcgggggtgaagaaaagaaaccggaaacaaagaaggttgcggcttccaatgccggcacaaaacctgcggaagaggcagctgaaaaagtgaaccggaaaccgcacgaaaaccaggcaggggcacaagaccacggaaccaagcagccagccggtgaaacagcaaaccgcaacggctctgtttacgccggcgatgatggcggggtggagaaaaagctgctgattgtgaaagtgatcaaggaactgttttaacatttttcgcccggtttgtggaaaagccggacaaacgggctggaacgaagtcgggttatcaacaaaatgcaaagtattatccacaagatgtggataatacttgtttcatttttcaaacttttgtatccttgccgggagaaaacttgataaataaatatcctggcagggccgatgattggatggagaaaggtgaaaaggatggaaacaaaatactgggttgtggataaaactgtggagaattccgggtcttatccacaacttgcagaagcagcacagttactgaaagagaagcagacagtcgcttttccgactgaaacggtatacggtttaggagccgatgcaacaagcgatgaagcggtggataagattttcaaggcaaaaggaaggccatccgataatccgctgattgtccacattgcggaggaaaagcagctggaagaattggcggaagaaataccggaaacggcgaaagtgctgatgaaagctttttggccgggcccgcttacgctcgttgtaaaggtgaagaagggggcattgtccaaaaaggtgacggccgggctggacacggtcgggatccgcatgccccggcatccggttgcactggcgctcatccgcctggccgggctgccgattgccgccccgagcgccaaccggtccggcaagccgagcccaacattggcccgccatgtccgggaagatcttgccggtaaaattgccgggattgtggacgggggagaaacgggtgtcggagtggaatcgaccgtgctcgatgtgaccgcgaaagtgcctgtgattttgcgcccgggcggtgttacgaaagaacagctcgaagaacggatcggaaaggtcaggcttgatccggggcttaaggggaccggcgcccggccgaaagcgcccggcatgaaatatacgcattatgcgccgaatgcgccggtttatcttgtggacggcagcacggcttttatgcagcaaatgatcgatgcacaccggaaaaaaggggaagtaacaggggcgattgtgacggaagaaacatccggtgaaatccgtgctgatgtggtcgcggtgtgcggcaggcggtcatcccttgagaccgttgcccggcacttgtatgatacactccgatcatttgatgcgcaaaaagtggacgtgatattttctgaaattttcccgcgtgaaggcatcggccgggcgattatgaaccggcttgaaaaagcagcggggcatcgttatgtaaaagaaaaggatgttcagtaaccccggacgtttccaaaccacccttatcacttggtcttgcttcattacggattgtgtgcgcgggagggggggtgccgggagatctgcggcttctaaaacaccccggacgtgcataagttggaataggcacgtccaaagggggaaaaagaatggcagtcctcgcagaaatggtaactttggcgatcatggctctggcgctcggcatggatgctttttcggtaagcctcggcgtgggcatgatgcagcccagactgaggcaaatcttttacataggtttaacggtcggcatttttcatgtgttgatgccggttctcggtgtttttgcgggccatcttctctcccatacttttggcctgtttgcccagtatattggcggcatattgcttgttatcatggggatacagatgattgtatgggtcttcagaaaggagggggcacaagctgtcagcccgtccggacggggaacaatgctgtttgcgttgagcgtaagcctggacagtttttctgccgggctgtcactcggcattttcggcgtgcggactgttgccgtcatgatttgcttcggcgtggctgctgcacttttaacctggctcggtcttttgatcggcaggaaattccaaggctggatcggggcgtacggcgaagtgctcgggggaacgatcctggttgtgttcgggctgaaattgctgttttctatttagggcttgctgaataagcaaaaattccagatttgacaaggatgttggctacttttgtcgaatataaagtgtaaggatttcaaaatttaccgaaaccgtaataatctggcatactgcaaatctcttggcattcgtctgagtgggccaaggttaggacgcccatccagaacggaagacaaaaccttggaacgcgtcgcaaggcaggatgcctctgaacgtaatgccgttgaaggcaaatttggcgaaggcaagcgcaagtatgggctgggccttattcgagcacgccttcaggagaccagcgaaacagtagtagcccttcaattcctcatactgaatctggagcgcaagctcagggttctttttttgaaatttttacacaacactattttatattttgataatcggaatttggcttgtatctgaccaaatttgattcgttcagcaagccctaattataaagggaatgtattttgtcattgtctatcaacaggaatcgaacgagaaatggcatgtggtggatttgataaagatcgaaataccataagaaaactttgtcccgccaaacaatatggcatgaattgtgaggggatgggaaagtgcccggtggtaaatggcgttcgaattccgctttcagaagaccggagaatatttacgccaattgaccgtgccagctacaaatggaaaagagaatacaacaaaagaacagcagttgaacgagtaaatagccgcatagatcaggtgcttggttttgaaaatcacacgatacgagggataaagaaaatgaccgtacgatgcggattagctctttgtgtgatgttagccatggcgctaggcagaataaaagaaaaacaagcacaaaatatgaggagtcttgtttgtgctgtataaaaaattatccacatgtgaataagtaaaagtaaaaaagatataaacaagcaaaaaatgcggataagacaacaggattcgtatgcccttttttgtataaagcaggcaaaacagagcattaaatgcaggaaaatcgcagaagatcatacctaaaaatgaaaatgtggtaaatttttagagtaaatttttttaatctaatctagaaaatcagtacatcgcaaaaagctcttaacagattaaccttgtaattaaggccttttttactataataatagtagatttaaatcgttctggatgagggggacagcctttgaatatcctttttgtttgtaccggcaatacatgcaggagcccgatggcggaggccattttaaaagcgaaacagctgccgggcattgaagtggaatcagccggcctttttgcgcccgagggggaagacgcttctgtccatacatacgaagtgctgaaagaaaatggaatcgatttccgccaccacgcccggaacctttcggagaatctggtggattgggctgacgtgattcttacgatgacgtccgggcacaaacaggcagtggcagcacggtacccgcatgcccgcaataaaacgtttaccatggcggagtatgccggaagcagcggggatgtgccggacccgtacggcggcagcctggatgcttacagagaaacctatcaacaattgcatacattgatcaatcgtttgattaaaaacaggaaaatgggaaaccaggggcgggtgtgacggatggaaaagcgaagctacagattcagtttaacgaagaaaattgtattgttcgtaaccgggctgtcttttattacatattcggcaagcggccttttcatttattttatctatccgtttttttcagactggataaagctgccgtggtttattgtcattacacttgcattggggattatctggtccgggattttaagctttttcggttcattcctgattgcaggcccgatgcgcaagctggaagatgcagcacttaaagcaagccgcggggatttaagagatgaagtccccgtgccgaaatcgggcgatgaaatcgagtcgctcgcagctgcttttaattccttgctttcgaatttgcgggagacggttgaacaaattgatgcaaatgtggaacgcaccaaagaaagtgtatcggaaatatcggaaaaaacagcactagctgcgggccaggcggaacatgtaaacaagacggttgaagagatttcacttggcgccgagcaatccgcggctgccacccaatctgcggctgacctcgttgaaaaaacttatcagcttgcatccgaagtccgcgggaaagcggatacttgcaaaaaatcttctgaccacatgctgagcgaattaaagacgagcaaagagacaatggactcgcttatttcaggagttgaaaaactggcgaaagaaaataccatttcgctggaagccgtgcgaggccttgcggaagaaacgaagaaagtggaggggatcatttcttttgtcggcgaagttgcggcgcaaaccaatttgctggcgctgaacgcctctattgaagcggcacgcgccggggaatacgggcgcgggtttgcggtggtcgcaaatgaggtccggaagcttgcagatgaaagcgcccaagccgtccaaggcattaccgggatgatccagcacattgagcaggaaggcacccgtgtagtcgaacaaattacagcgcaggttcaaaaagccaatgaagaagtgtccagagggcaaaaggccaatgaagcgatggacagaatggcggaatcgatccatttggttgcgggggcggttgatcaaattgccggcatggccaaaaaccaaatggatgcgattcacgaagcctcaagccagtcgcaggaagtggcggccattaccgaacagacttctgccggggcaaaagaagtgacggcaattacgaatgagcaggcgcagaacatggaactgattaaaaggcttatcgtgcagctcgagcaggatgcggagaaattaaaagggagcaccctccgttttcatatccggtgaggttttcgcccgcctggttttggacaggaagcaccggttttggctggaagaaccgcggcaattccggtttcgcgccgggaaattccgcgtaaaggtgccctgaagataagggcagatgcgggacatgcggccgttgcctagcattttcccgaaaacggcgggcgttttaagtggcccggacattcggctgcggcgctttattttctttttcgccgttctgtgccacaatagaatcagaggcatgaaggaggggggaaaacatgaaagttgcattggcttcagatcacggcggtaagcgcctcaaacaggaaattgccggtttgcttcaagatctgggtgtggtgtacgaagatttcggatgcgattgtgaagggtcggttgattatccggattacgcgcttccggttgcggaaaaggtggcaaaaggggaatttgaccgtgctatcctcatttgcggtaccgggatcgggatgtgtatttccgccaataaagtaaagggcatccgttgcgcgcttgtgcatgatgtcttcagcgcgaaggctacaagggcccataatgacagcaatgtcctcgccatgggagagcgggtcatcggcccggggcttgcctgtgaaattgtgaaagaatggctcggaacgccgtttgaaggcggccgccatgcacgcaggattgagaaaatcgcgcagtatgaacaaaaataacagaggtgtttttgttgcaatcagatccggcacgtttggaggaacagttggaccgcatgctggatgaatttttccggcaggcgccaatgaaaaaaggacaggtttttgttgttggatgctcgacatctgaagtaaccgggaaaaaaatcgggacagccggggcaatggacattgccgcaatcatttatggcggcgtacagaagtttgcacgccggttcgggttccaaccggcatttcaatgctgtgaacacctgaaccgggcgcttgtggttgaccgttcgcttgccgaggaaaggggatgggaagaagtggcggtcgtgcctgtccggaaggcgggcggcgtgatggctgcgtatgcattcgcccatatggaagatcccgttgtcgtcgaattcatccgcgctgatgcgggcatcgacattggggacactttgatcggcatgcatttaaagcatgttgccgtccctgtaagggtttccggaaaagagctggggaaagcccatgttacatttgccaaaacgcggccgaaactgatcggcggcgtgcgggcggtttacgaaaaagaacagccggaataagggaccatccgtactgccccgcatgttgtgtgcggggcatgtttttttcttcttgttaaaaaaatggacaaaatttgcaaagcattatggtaaaataaaaaagaatatgaaaacgatcttgagggggtaccgaattgagccatattgcaaatcaagacaaggaagtttacgaggcgatccggcaggaattgaaccggcaaagaaacaagattgaactcattgccagcgaaaattttgtcagcgaagcagtgatggaagcacaaggttccgttctgaccaacaaatatgcggaagggtatccggggcaccggtattacggcgggtgcgaatatgtggatatcgtggaaaaccttgcgcgggagcgggccaaacagctttttggcgccgaacatgtcaatgtccagccgcactccggcgcacaggccaatatggcggtttatttcaccattctggagcacggcgacacggtgcttggtatgaatttgtcccacggcgggcatttgacacacggcagcccggtcaatttcagcggcatgcagtaccattttgtggaatacggcgtggataaggaaacgcagcatattgactatgaagatgtgctggaaaaagcgcgcgtacataagccgaaactgattgtcgcaggtgcaagtgcatacccccggacgattgattttaaaaagttcagggaaattgcggatgaaacaggcgcctatttaatggtggatatggcgcatattgcaggacttgtggctgcagggttacatccgaacccggtgccgtatgcggattttgtcacgaccacaacgcataaaaccttgcggggaccgcgcggcggcatgattttatgcaaagcggaatttgcaaagaaagtggacaagtcgattttcccggggatccagggcggcccgcttatgcatgtaattgctgccaaagccgtcgcttttggagaggcgcttacagacgggttcaaaacctattcgcaaaaagtggtggacaacgcaaaacggctggcggaaagactccaaaaagaaggatttgaccttgtatccggcgggacggacaatcacctgattctcattgatttgcgttctttcgggattaccgggaaggatgcggagaaggtgctcgatgatatcggcatcacggccaataaaaatacgattccgtatgacccggaaagcccgtttgtaacaagcggtctcagaatcggtacccctgcagtcacaacaaggggattcggcctggaagaaatggatgaggtggcgtccattatcggatcggcattgaaaaatccggataacgaagcagtcttaaaagaagcggcagaacgcgtccggcatcttacggaacgcttcccgctgtacgccggccaaaactgagcaggcgcattttagcgcccgctttttccggacggatagctggctggtgcacttccaatgcggcataaaaacgaaccggcaaaaaaattgaacaggaaggcctcgtaaaccgcggggccggtcctttcgcctggcctcaggattttcttttggctttccttgagattgggcgcttttttcgtgtaaaatggttggggtaagcatttgccgaacctgataccaacctttaaaggagagaattcatttgagtacacttcatgtcattgaccacccgctgatccagcacaagttgacgtatatccgcgataaacatacggggacaaaagaattccgcgaacttgtcgatgaagtttcgactttgatggcatttgaaattacccgtgatatgccgcttgaagaaattgaaattgaaacgccagtctgcaaggcaaaatcaaaaattttatccggcaaaaaaattggcattgtcccgatcctgcgtgcgggcctgggcatggtagacggcgtgcggaaactaatcccggctgcaaaagtcggacatgtcggcctgtaccgcgatccgaagacactgacgccggttgaatattacataaaacttccaagcgatgtagaggaacgcgattttatcattgtggatccgatgctggctacaggcggttctgccgtggatgcgatccagtccttaaaacagcggggtgcaaaaaacattaaattcatgtgcctgattgcatcccctgagggcgtggaagccgtgcagaaagcccatccggacgttgatatttatacagcagcccttgatgagaagctgaatgagcaagggtacattgtgccgggtctcggagacgcaggggaccgcctgtttgggacaaaataaaatgtatggatgcgcttagtgttttacaattttgttaacccgtcagaaacaggctggtaaaaaaataaaaagggtctataataacggtatgttttcggtatagagatgaatgccaggcatgtaaacgattggaaaagcagcgcaagcttacgccggtgtacggtgtttccttcctgttctgggaagcgggatggccattttctgaaaaaataagttctaatgactatatcaaggaaactcctattgacattggataagcgctattgtatgctaaaaaagtgtacataatgagaaggttttcatgaggttgggattctactattaatatgccggaatgccggaaatgtgaaaaaccagtaaagccggggctgcaggctgttcgtaaccttaacaaattgcaagttttggttaagaatgttgcaatttgctaggtgaggaagtgacataccgctttcctgctgtgctgcaaacgatcggcgtcccttgtcaggagtgtttaaggcatgccggaacttctacgtatttacaaaagacagcgcaagtatttggtgattcttttgtgcctttatttggcgggggcgatgtttcccggttaccgttctgttttcctcgggcttttgcttggcacaactgtcagcctctttaacttatggcttatggtgaagaaaacaatggctgttaccgatgtttctccgggcaaaaaaaggatctcgctcggtaccgggatgagaatggcggctgccgtactcgcggtagcggtggcgctccgttttccggatttgtttcatctattggctgtagtgattggcataatgacatcttatctcgtcattatgatagatttttttgtaggtttgcttcaacaaagaaaaaagtaaagtgaggtgagtttcggtggaacataagcaaccgatagtcgaattcatggggttgtattttaacctgtccaacgtcatgatgattactgtctcatccttgatcgtgttcatcattgcggtcatctcaacaagaaagttggcgttgaaacctacaggcatgcagaattttatggaatgggtcatggattttgtcagagggatcattaaaagcaatatggactggaaaaccggcggcgtctttcatattctgggcctaacattgatcatgtatatctttgtttccaatatgctcggattgccgtttatggttgtttatgatcattattcctggtggaagtcacctacttccgacccggttgttacccttacgctggccgttctggtcatgggcctgtcccacttttacggtgtcaaaaagagagggtttggcggatatctgaaaagctatgctgaaccgttatggtttttggtcccgattaacctgatcgaacagtttgccaacacgttaacattagggctccggctttacgggaatatttatgccggcgaagtgctgctgtcgctgcttgcgggcactttggcgatgcatacaaacatttgggggacaatcggagcgattattccgacccttgtatggcaaggattttccatttttgtcggcacgatccaggcatatatttttaccatgttaacaatggtttatatttctcataggattgcccatgaggaataaccatttctatatttttgaaaaatcatctatttatatattccaaaggaggaaatcttatcatgagtttgggtattcttgcagcagcaatcgcggttggtttggcagcattgggcgccggtatcggcaacggccttattgtcggtcgtacagttgaagggatcgcaaggcagccggaagcacgcggccttttgcagacaacaatgtttatcggcattggcttagttgaagctcttcctatcattgcggttgttatcgcatttattgcactgggaagataaggaacatgttgacggcgaagcggattctaagagaccttcgcctttcctttatggtttagccgggaacagctgtagtttcggttatgagcggttcagggcaatcatttttgaaccattttgcttctttttttggtaaaaggtgcgaaagaatgttttaagaacgtgtggaagggagtgaacccgggtgtcccagactgatttagtactcggatttgtgctagggaagctcaacacaggcgatattttattccaggccattgtgtttgttgtgttgcttctgctattgaaaaaatttgcttacggccctctagttgaaatgatgaggaaacgtgaggaacatattgcaaaagaaattgaaacggcggaaaaaaaccgcgaagaagcagccaggcttttggaagaacagcgcaagatgctgaaagaagcacgtgttgaaggccagaatttaattgaaaatgcaaggaaacaggcagaagtgcagcatgatgatatcgttgcaacagcgcgccaggaagcagaacgcatgaaagatgctgccaaagttgaaatcgaacaggaaaaagcgaaagctgttgctgctttgcgtgaacaggtagcatccttgtccgtgatgattgcctctaaagtgattgaaaaagaaatttccgagaaagaccacgagaaattcatactcgattctattaaagaggcaggagaaatgaaatgagtaatgaggcggtagaaaaacggtacgcttcggcactttttgagcttgcaaaagagcacgggcagcttcaagaaatcgaaaaagaagtccgggcggtaagagaggtttttgaggaaaacgaaccgttccgaaagctccttaaatctccgaaattgacgatagaaaagaaacaagaaatccttaaaaacattttttctggattatccactttcactttgaatttgttgttgctcttgactgagcggcacagggacgagctcatcccgagggtatgccgtgcttttattgaacgggtgaatgatgaacgcggtattgcagatgcacttgtctactctgctcgcccgctttctgctgacgagagcaaagcgatatctgaagtatttgccaaaaaggtcggaaagcggtctttaaacattgagaatatcgtggatgacggtctgctggccggattaaagattagaatcggcaactctatttttgacagcagtttgcgcggaaaattggaacgtcttgaaaaaacattaatcagttaagtgagaaatgaggtgctggatttatgagcattaaggctgaagaaatcagcttgctgataaaaaaacagattgaaaattaccagtctgaaattgaagtgagcgatgtcggtaccgttatcgaagtcggtgacgggattgcgcgtgcacacggtcttgaccaggccatgtccggggaactgctggaattttccaacggggtcatggggcttgcgcagaaccttgaggaaagcaatgtcgggatcattattctcgggccttaccgcgaaattcatgaaggcgatgaagtaaggcgtacaggccggatcatgcaggtgccggtcggggaggaactcatcggccgtgtcgtcaacccgctcggccagccggttgacgggctcgggcccatcaacacaacgaaaacccgcccgattgaatctaaagcgcctggcgtaatggaccggaaatcggtaagcgaaccgctgcaaacggggattaaggcgatcgatgcacttgtgccgatcggccgcgggcagcgggaattgattattggcgaccgccaaactggtaaaacgactattgcgattgatacgattataaaccaaaaagaccaggacatgatttgtatctatgttgcgattggccaaaaagaatcgaccgtccgcggtacagttgaaacgctccgcaaattcggggctttggattatacgattgtggtaacggcttccgcttcgcaaccggcgcctcttcaatacctggcaccgtatgccggtgttgcgatgggcgaagaattcatgtacaacggaaaacacgtgctcgttgtgtatgatgacttatccaaacaggctgttgcttaccgtgaactttccttgctcttgcgccgtccgccgggccgtgaagcatatcctggcgacgtattctatttgcactcccgcctgcttgaacgtgccgccaaattaagcgatgcaaaaggcggaggttcattgaccgccctgccgtttgttgaaacacaggccggcgatatttcggcttacattccgacaaacgtgatttcgattacagacgggcagatcttcctgcagtccgacttgttcttctcaggtgtccgcccggcgatcaatgcagggttatccgtatcccgcgtaggcggtgccgcgcaaatcaaggcaatgaaaaaagtttccggcacactgcgccttgacctggcatcttaccgtgaacttgagtcatttgcccaattcgggtcggatctggataaagccacccaggcaaaactggcacgcgggcagcgtacggttgaagtattgaagcaggacctgaacaagccaatcaaagtggaaaaacaagtatgcatcctgtatgcattaacaaaaggattgctggacgatattcaagtggaagacattctccgttttgaatcggaactttatgactggctggaccagaatcgggcatcactgctcgaagaaatccgtacaaccggaaatcttcctgacgatgaaaaaatgaaagaagccattcaggcatttaaaaagaccttcgtagcatctgaacatcaataattggacagagaaccccgttacccgtatgcggcatgcgtgctttttcactgcagcatccgaaccgaaggcaaacgggccggacagacaaaggatttcaatccaggattggaatcctgattaactcacaagggtggtgaagtgaagtggcatccttacgcgatataaaaaaccggatcaactctacgcagaaaacaagccagattacgaaggccatgcagatggtgtcggctgcaaaactgaaccgtgcggaattgtccgccaaatcatttgtcccctacatggagaaaatgcaggatgtagtagtcagcatttcccaggggacaggcggcgcccggcatccgatgcttgtttcccgcccggttaaaaggaccggttatttcgtgatcacatctgaccgcggactggccggcgcttttaacagcaacgttttaaggcttgtaacccagaccatccgggaacgccatcaatctgatgatgaatatgcgattattgtgatcggccgtacaggatacgaatttttcaggcgtctaaagatgaatgttgtgctgcagattgtcggcctgtctgaccatccgacattccaggatatcgaaaatatcacgaagaaaacggtcgcgatgtatgaagacgggacattcgatgagttgtatttgtattacaaccattttgtcagcgccattagccaggatgtgacggaaaaaaggctgctgccgcttacggatgtaacggcgacaaaccggctcatttcctatgaatttgaaccgtctgtagaagaaatcctgaatgttttgctgccgcaatacgcagaaagccttatttatggcgcgctgctggacagcaaagcaagtgaacacgcggcacgcatgactgcaatgaaaaatgcgacggacaatgcaactgaattaatcgactcgttgacattgacatataaccgtgcccgccaggcatccatcacacaggaaattacagaaattgtcggtggagcagctgcactggaataatttccgttttggcaaaccgctcttttgccgaaacggatcgggcatgtgccatcaagcaagttaggagggaacagtatgagcattggacacgttctgcaagtaatgggtccggtagttgacgtaaagtttgaaaacggtcagctccctgatatttataacgcattaaaaatcaattataaagcaaaaaatgccaatgaagtggatatcaatgttacactggaagttgcattacacctaggcgatgatgccgtccgcacaattgcgatggcttccacagacggtatccgtcgcggcatggaagtagtggacacaggcacgccaatttctgtaccggtaggggaagcaacccttggccgtgtatttaatgtgctcggggaagtcattgaccttgacggcgaactgaaaggcaatgtgcgccgcgacccgatccaaaaaccggcgccttctttcgagcagttatccacgcaggttgaaattcttgaaaccggcattaaagtcgttgaccttttggcgccttacatcaaaggcgggaagatcggtttgttcggcggtgccggcgttggcaaaaccgtgttaatccaggaactgattaacaacgttgcacaggaacacggtggtatttctgtattcgccggcgtaggggaacggacgcgtgaagggaacgacctctactacgaaatgaaagattccggcgttatttccaaaacagcaatggtgttcgggcaaatgaacgaaccgcctggcgcacgtatgcgtgtggctttaacaggcctgacgatggctgaatatttccgtgacgaacaaggccaggacgtattgctctttatcgacaatattttccgtttcacacaggcaggttctgaagtgtctgcgttgctcggccgtatgccgtcagccgtaggttaccagccgacccttgcaaccgaaatgggccagctgcaggaacggattacatctacaaataaaggttcaatcacatcgatccaggcgatctatgtgccggctgacgactacactgacccggctccggccacaacattcgcccacctcgatgcgacgaccaaccttgaacgccgtttgtcggaaatggggatttatcctgctgtagatccgctcgcttcgacatccagggcattgtcccctgaaattgtcggggaagagcattacaacgttgcccgccaggtacagcaaacattgcaacgttatcgcgagctccaggacattatcgcgatcctcgggatggatgaactgagcgaagatgacaaactggttgttgcgcgcgcacgccgcatccagttcttcctgtcgcaaaacttccacgttgcggaacaatttaccggccagccgggatcttatgtgccggttaaggaaactgtccgcggctttaaagaaattcttgaagggaaatacgaccatcttcctgaagatgctttccgcctcgtaggcacgatcgaggatgctgtgaaaaaagcggaagccatgggcgtaaaagcataatgcgggaccgggaggaagtaaaatgaggacatttgaagccagtgttgtcaccccggacggcccggtatacaatgcggaagtggaaatggtaattgcaaaagccaaaagcggcgagatcggtatcctgtacgggcatgttccgcttgttgcgccgcttgatatcggagttgtccggtttaaaaacggcgaccaggaaaaagtagttgcagtgagcggcggcattttggaaacacgctccaaccaggtgaccattctggcacaggctgccgaaacacccgaacaaattgacatccggcgggcggaagaagcaaagcagcgtgcagaaaaaagattgcaccagtccgatcaggatgatatcgattttagacgggcggagcttgcgttaaaacgcgcgatgaaccggattgaagtctatcgccacttttccagataaccgcttttccttactgtcattttatgatcaaaaaggcaccttctgcttcttcggaaggtgtttttctttaagcagccggtttgccgggcaaggcgcctgaacgggcaaaaacaggaagggaatgaggacagatgacagctgaattcggaacgcaggcagtgctcagcatccttgtgaatttgttttttattggcatgacgttttggatccttcaagccgtccatattgacaagatcataaagaaaaaccgcattgtccaggcaaggcttttgtatattttcctttctgtcgcaatcggatacagcgtcagcaattttttccttgactatttgctatgggtgcagcgcctgcatttcctgttccaatgacgggtaccgctaagcattgtttcaaaattccaattgatcggttcttttgaggctgaaaaatggttcgtttttcctgtttccaaaaaatgatccgttgcatacaatttaggtatgcttttttgacaaaattcattatactagtgtatagggtgtcaaaacttgacgacttttacctggtatgtctgccgtctctcttgttaacacttttaataagggagaggggagcgcaaagatgaaattccgatttgtatatccggttttggcaattgttggtttgacactgattttcgtggggaataagacagatgcggccaattttacggatcaattgcagttatttcaggcgtccattgcaaaattgaacggcaaagtcactgaatggtctttatatacaagagaacccctgcgggcgccgtccgaaccggaatgggccgaaaaagtgcagacattgcaggatacattccctgaaatgcactggtcggtaaaaaaggacaggcatgtgaaggtgctcacgggcaagctggaaaaaagccattatgtcgaaaccgtaaaattgatgtcgaccctatcaaatgctgaaaacggttcgtatatcatttatgaagtgaatggcaaaggatgggaccgcgcgcaaatgcgcaaagtcaatcaattggtatctgcccgcactcgagcgctttttacgaaaaagcccatggttttctcttgtatcaaaggcgaattcagtgataaaatggatcatgttttgttacgtggaaaaaaagaacaattgctgaaacgtcttgatgcgcaagaaattgaaacaatggaagaaaagaacttttatgcggtttccggatactcgcctaagttttctgaaaatatccatgccaaaaaccggaaaatgaatgtgcaaatcggtttgcgagacagcggtttgggcggtaagacaacggtcgtaattggcacacccatcattacgattgaatattaatatagagaatatggacgcggaggggaatactcttggaaaagatcatcgtccgcggcggaaacaggcttcagggcaccgttcaagtggaaggtgcaaagaatgccgtattgcctgtgatcgctgcatcgttattggcaagtgaaggaaaaagcatcatacgtgatgtaccacaactctccgatgtatttacaatcagtgaagtgctgcgccacttgaatgctgaagttacgtttctggataatgaaatcactgtagatgcatcaagggagttatcaattgaaacgccttttgaatatgtacgcaaaatgagggcatcttttttagtgctggggccattactggcgagaaccgggaaagcaagggtcgcattaccgggaggctgtgccattggatcccgccctattgacttgcacttaaaaggatttgaagcaatgggcgccaaagtagatgtgggaaacggctttattgaagcgtctgtatccggccgcttgcatggcgcgaaaatatatatggattttccaagcgtcggcgcaacccagaatatcatgatggccgcatcgctggctgacggacaaacggtcattgaaaactgtgcaaaagaacctgaaattgtggatcttgccaatttcctgaatgaaatgggcgcaaatgtaaaaggtgccggcacgggaaccattaagatcgaaggtgtggagaagctgcatgctgctgatcataccatcataccggacagaattgaagcagggacatttatggttgccgctgcgattacaaagggaaatgtgttggtaaaaggtgcggtacctgagcatacttcttccttaattgcaaagctggaggaaatgggtgtcaccatcattgaagaagagaacggtgtccgggttatcggcccggaaacattaaaggcagtagacataaagacaatgccttatccgggattcccgaccgatatgcagtcacaaatgatggcgctccttttgtgtgctgaaggcacgagcgtgattacggaaacggtatttgaaaaccgattcatgcatgtggaagaattccggcgcatgaatgcggatttaaaaatagaagggcgttcggttattgtgaacgggccgtgcaatttgcagggggctgaagttgccgcaacagacctgcgggcagccgccgctttaattattgccgggctggcggcaaaaggcattacccgggtgaccgaattaaaacatctggaccgcggctatttgaactttcatttaaaactggctgcacttggggccgacattgaaagggtcgacgacgaagcggaagttgcgccggcaaaacaagatcaattgcttgctgacgccaatctttagtttgtataaaaacctctgtacatattccccatgtgcagggttttttttcgccatttttcttctgctgttcccattatggacaaaacaggccggtttcaaacgtacaggccttgatttttcatgcagttgttgaaacagtttatgctgaaacgccgtccaatgcgtttcctcccgcctcaagcgatgcgcctccggaacttatccggttgtcgccagagcgcgccgggaaggttcgtcggctttttttcggtgctgccccatgcttgccccgcacacccttgagcgtgcatttttaatcataaatgcttgtcccgtcccataaattggagtataggctttccaccacttcgatcatatggaggcgtcagcatgaaaccaatcaaacccgttgtaatcgcagcgatcctcgtcctcgccttttcctttctcattccggcccttgtcgtccttccgttccacaacgacaaggtgagcggaaaattgcatgaaaaaaaaccgccaaaggaggagaaagcaacggtatccgtccaggtatccgtatacagaagcatggagaaaaaggttgaccgcgtgccaatggaagactatgttgcaggcgtggtcgcagctgaaatgcctgcaacgtttaaactcgaggcattaaaagcccaggcactgactgcccgcactttcattgtcaaccggatgttaaatggcggaaacagggatttgccggataatgccaatgtgacagatacggtcaacgaccaggtatatttgagccgggatgaactgaaaaacgtttgggggaaagcgtatcaggaaaaaatggagaaaatcgacaaagcggttgctgcaacagaaggcgaaatcatcacttaccataacaagccgatcgatgcagcgtttttttccaccagcaacggctacacagaaaatgccggcgattactggtccagtgccgtaccctatttaaaaagcgtgaaaagcccgtgggatcaaaactcgcctaaattcaagaaagtcacatccatccccgccacggcgttcgaacaaaaactggggatccggattcaagcgaatgatacgggaactgtcttatccaggacagaaggaaaaagagtggcgaaaatcaaaattgccggcaaagttttcaccggcaggcaggtgagggagaagctggggctgccttcttcagattttacatgggaaagaaaaggaaaagaaattgaaattataacgaaaggatacgggcacggcgtcggcatgagccagtacggggcaaacggcatggcacaggaagggaaagattataaagcgattgtggcgtattattatcaaggcgtcacggtgaaaccattcagccaaattgccggagccggcgccctggcaaaaaaataatccctcccggacaaaaattttttaaacttgatgtataaacaaatgaagaaatgttcagaatggttgctgaggtgatgataaatgagagaggaagaaaagaaacggccttctcaaccaaagaacataaaaaatttcttcaaaaaacgctgggtctatccggcaatctatttagtaagtgcggtgctgttgattacagggattatttggtatcagtcgcttggaacccattcggcaaaagaaaaatttaaaaacgatgcatccatcagccagaaaggatccggcaatgacgcaatcgaagtaaacaaagcggtagaaaacttcagaatgccggtacaaaaacctgaactggccacgattgagaagaagttttacgacgcgaatgcttccgtcaaggaccaggaagccgcactcgttgtatacggcaacacatatcagccgaaccagggaattgacatcacgatgaaaaatggcaaaacatttgacgttgttgctgcaatgggcggtaccgtcacaaaagtgcaggaagatgccgttttgggcaatgtcattgaagtcgaacatgacaaaggcgtgacgaccgaataccaatcggtgaaagacattgcggtgaaagaaggcgatatggtcaagcaaggacaaacgatcgcaaaagccggccggagcgagctgaacaaagccgccgggacgcatcttcattttgaaatccgcaaagacgatgtggcggtcaatccggaaggctacttcaataaaacggccagcgacgtcaaaacgccggaagtttcatccgaaagcagccagtccaagcaaagccggtcttcggaaaaaacatcaaccagccagaacagccattaatacagcccgcgtgtatacaggacagaaaacctctgtcctttttttgttttccgcccgcttcccgtaaaaaagcagtttcttgcataaaatggtacacaagctaataaactgttacaaacttgacaaaaaagcgggagtgtttgaggtgaggaatcgttaatgacgggagcatcttcgctacagacttgattatattctgcaccatcagaaaggcttcactttctgccgcaagcatgaacagcctgcgggatccagtacaaaattgaatccggcgagtctcatttcacacgcctcacatccaattttgggggagggcgagtagtgtgcacgattacatcaaagagaggactatcaagattgggaagtatatcgtggagacgaggaaaacagttcgcgtaattgcgaaagagtttggcgtatccaaaagtactgtccataaagatttgacggaaaggctgccggaaatcaatccggaactggcaaatgaggtaaagaatatcctcgattaccataaatctgtccgtcatttgcgcggaggggaagcaacaaagcaaaaatataaaaaagaagagtatccggtcacagagtaacagaaaaaccgcagcagcgctttccggctcatgagggctccatgattcctgaaagaagcaatcgaattgcgcggttgcttctttttacggtccgggcccgttttgggagcggttccggccacaggatgcgcagctgcttccatccggtaaacggctttcgcagaattgaaacggacaccccgcgcgaaagctgcttttttgcaaaccgggcccccccgtaaaatcccctccgtttgcctcgcttgaaaaatacccgaaaataaaatttgacaaatgatcccgaaacccggcaaaaatatgctaaaataaataaccagggataacagacaatgatagacttcgaatagataaatcgtcctaaaaaagtttgaaaaatgaggaaggagcacatacatgtttgcaaaggatataggaattgatttgggtaccgcgaatgtactgatccacgtaaaaggccagggaattgtgctgaatgagccgtctgttgtagccattgagaaaacggccaataaagtgctcgcggtcggggaggaagcgcgccgcatggttggcaggacgccgggcaatattgtcgccatccgcccgctgaaagacggcgtcattgccgattttgacgtaacggaaacgatgctgcggtattttatttacaagttgaatgtaaagggattcttatcgaaaccgcgcattttgatttgctgcccgacaaatattacgagcgtggagcaaaaagcgatccgcgaggcagcagaaaaaagcggcgggaaaaatgtttacctggaagaagaaccgaaagtggcggccatcggtgcaggcatggatattttccagccgagcgggaatatggtggtcgatatcggtggcggcacgacggatattgcggtactgtcgatgggggacattgtgacaagctcgtccatcaaaatggccggtgacaaatttgacaatgaaattctgcagtatattaaacgggagtacaaactgctgatcggcgaacggacggcagagaatatcaagatgaatatcggcacggtatttccgggcgcccgcaatgaagaaatggacatccggggcagggatatggtttccggcttgccgcggacgattacgatcaaatccgctgaaattgaaaaagcgctgcgtgaatccgtgtccatcattgtccacgccacgaaaaacgttttagagaaaacgcctcctgaactgtcagccgacatcattgaccgcggtgtcattttaacaggcggcggggctcttttgcacggtattgaccaattgcttgccgaagaaattaaagtgccggtccttgttgccgaaaatccgatgagttccgtagcgatcggaacaggcatcatgcttgaaaatatcgataaaatttcaagaagaaaactcgtttaatcaaacgtttgatgaatgctccagcgaggtgaatggcaatgttacggggtttatatacagcggcttccgggatgatcgcccagcagcggaaaacggatttgctcgccaataatttatccaacgcagacacgccggggtataaaacggaccagtcatcgatccgctctttcccgaaaatgctgctcagctatatggataaaaacgggacaacaggcgaagtagtgaaatcggtcgggtcacttgcgaccggtgtttatatgcaggaaacactgtcgctttttaaacagggtgaccttaaagaaacaggcaaccggaccgatttggccatattagatcaggcttcaccgcaaggaagcctgttcttccgcatcgatgacggcaacggacatgaagcctatacgcggaacgggaatttcacagtgaacccggaaggctatttaacgaccgcttccggccattacgtgctggatgaaaacgggggccgcattcagacggggggaaccgatttttccgtcgatgcggctggcgcggtaacggaaaacgggcggtatgcgggcacgatcggccttgcctacgcccaaaatccggcacagcttgagaaaacaggcgacggtttatatacgctcgcgaataacggggcgctgccagctgcaggccaaaacggctttcaaatcaagcagggctgcctggaatcttccaatgtcgatgagacaaaaacaatgacagatatgatgagtgcttaccgctcttttgaagccaatcaaaaagtgctgcaggcttatgacgcaagcctcggcaaagccgtaaatgacgtaggaaaagtataacggagaatggtggggtgagacagcgccatgaatcaatccatgttgacagcaaccaatacgctcaggcagttgcaggacaaaatcgataccatcagccataatgttgctaatgtggatacaaacggctataaaagcaaacaggcgagctttaccgatctgctcgcccagcaaatcaacaaccagccggatccatccaaagaaacaggcagaaaaacgccgtacggcatccggaccggcacgggggcaaaactggcacaagcggtgctttccccatcgcagggggcgcttgaaaataccggacgcgcccttgatatggcctttacaaaagaaaaccagtacttaaaagtgcttgccggggtaaatggccgtaatgaaacggcctttacccgcaatggcgcattggaagtatccccgctcggaaacaatagaagtatgctcactgatgcgaacgggaatcctgtcctggatgagaataacaggatgattacattccagggcagagtagcagattacgcgatcaggccaaacgggatcttgcaggtggcatacagtgacggcacgcgggaaagctttaacctcggcgttgtccaaatacgcaacccgcaagtgctggaacaggccgggaacaacttgctgaggctgccgcaaaacgccaatgcggcaaatgtatacaccgatttaaagggggcaaaccgcagccaaatttctatgcagcagggcgcgcttgaaaaatcgaatgtcgacctttctgctgaaataacggagctaacgaaaacagaacggttgtatcagttccagtcaaggacgattacattgtccgaccagatgatgggccttgtaaacaacatccgttcctgatgattcgctttttacgaaaaccagctgccttacgtactttaaggcagtatccggggacgcggccgtttcgaatcctgcccgccgccttatttctcccggactgaaactgaaaacggaggattttttgccaatgttggatttacagcaaattaaagacattctcccgcaccgttatccttttttattgattgatcgcattcttgaggtggaagaaggaaaacgtgcggttggaatcaaaaacgtatccggaaacgaacctttttttgcaggccactttccgcaatatccggtcatgccgggtgtattgattgtggaggcgctcgcacaggtgggcgcggtcgccatgttgaaaaaggaagaaaaccgcgggaaacttgcgctttttgcaggtattgacaagtgccggtttaaacgccaggtaaaaccgggagaccagcttcgcctcgaagtggaaatcatccgcttgaaagggccggtcggaaaaggcaaagcggttgctacagtcggcggggagcttgcctgtgaagcggagatcatgtttgcactcgaaaaatagcagcggaacagatcttgccgcttttttccgtaaaaaaaatcagccggatgtccagctgaccaaaagagaaggggatagaagaggatcggtattctcaacaaatattctatctgatggggcaatataggagaaacgttaggaactggtaaaatggaaaagaaagttggaaaaggaaaactcatacgtttacttcagatgtggcacgagtgcgggcattttgcggctctcttcctctatccgttttacttcctgcatcaaaagtgcaagctgccggttcagcatgccctgtttgacgatcatatccgctaatacccgctcaagtgcatccaaccgttttgcagcgtcttccattgcatgctaccctccctggccggtttcctgcagcggtttgttttccggccgtttgcttaaaaattggactgtgtcggcaatgacttcggtgacgtagaccctttttccgtccttattatcatagtggcgggtctgaatccggccggtaatgccgagcatggaaccttttgcgcaatatttgcttgtattctccgcgattttattccaaagggtacattggacaaaatcggttaacgtttcgccaaattgattccggtaatggcggtttaaggcaagcgtaatatttagcaccggttttccgtctgctgtgtagtgaagatccggatcttttgtgagccttccgactaatgtgacctggttaatcaactgatccacccccttcctgcatttatcttaccggctttcatttttcttgtaaaatcgccatttttcaaaaatagccccttcgtttcgtgcaaaaatgtatttttgcacgcctggtttttacatatttcggcagtaaaaagaggttatggcattatttaaaattttttctttggcatcaaccgggcgaaaatgggaacttttaccgcggaaacataacagctggttcccggcttggacttgcattgtccagacttccgcctttttgatgcaggtgagaaaatgggctgttgccggtgatcgtctgttggatgtatgttataatttttacaaacgaatagggaggaaagggatgaaaacgtttaagatcctgtcgcttaccattttgaatgacggcgaacgcgtgccgattccgttgattgacgggctgattctgaacaaggaagatgggcggggcacctggctgattgaagcatacacggagagcaagcatctgccgttttttgcggaaaaagaaaagcagcagacggagctggatactgaagtggtgatcacgtatgagaacaatgatccggcaccgctttcgacccgagtcaggggaataaaagaatttgacggaacgatcagcgtcctgctcgaagggaaaatacgctcgaggcggatcgcgtatgcggaaaagctgttggaggagctggtccgcgaagggtacgaaggcgaggaattaattgaggcatttaaagaaagattaaacggaaaaggccgctctgcgtcataaaacagagcggccctttcgcgcctttatttttgcttttttaattcgatgacttccttatggactttgttatcttcttcccaataaatgacggcttctggatgttctcctttttttggcgcgtctgtatattctacaaatcctgtgtctggagataccttctctttgtttgctgttttgtccccggcttccatttcaccaccgatccaatattgtgtttttaaaacagaaaccttatttttctcttttttggagccattccaaatgaaatctccagaataattaacatcatcagatttctcaccgttatacgataatacagccgtccatttgccgctcttgctgtggcccacccatttcgggtagcttggcttttccttttcatggacaaccataccgactataatgccgattacgacaacggcagcaatgatgcctgtgatagcccaaggttttttcatgtttaacgtgccctccatttttgttgataataataaatattcaaaaaaatgtaggagagggggaacctcagagcgggtgcccccctctatttagctttgcagcaaaaccaaatgtttcaattcgtcatcggacagttcggtaacccagttgtcactttggataatttcatcgttcagcgcctgctttttctcaagcatcgcgtcaatcttttcttccagtgtgccggtcgcaatcaatttgtggacatggacaaaccgctgctgcccgatgcggtgcgccctgtccgttgcctggttttcaacagccgggttccaccagcggtcataatggatgacgtgattggctgctgttaagttcaaccccgttcccccggcttttaaactcaggagaaaaacagggaacgccttgttttgaaaatcacggatcaactggtcgcgttttgcttttggcatgcttccgtttaaaaacggaacgtcaaggccaaacagctccttcatcatttgccggatcatttggcccatcccgatatactgggtgaaaatgaggcacgattcccccgtattcaaaatggcttctgtcagcgttgccagtttttccagtttaaatgaccgttccaaaaggttcgccggtttttcttctttcagaaacagggcaggatggttgcacaactgcttcagacggtttagcatctgcaaaatcagcgctcttctgccaagcccactcagctggccgatccccttaaaagcattttgcaccgtttcttcgtacaatgccgcctgctctgccgtcagcgggcaaaattctttttgctccagcttttcgggcagattcagttccacatccggatcttttttcgtccggcgcagcaaaaacggccggatgaggcgcttgagctcacggattttttcttttgacccgtccttttcaatcggggcgatgaaccgtttttggaactgcctgaacgtgcccaaatagcctttattggcaaaatcaaagatcgcccacagttctgaaagccggttttccatcggggtgccggtcaaagcaatataatgcctgccctttagtttccggatcgcccgcgactgtttcgtctctgcatttttaatgttttgcgcttcatcaagggcaatcgtgctccattccacagctgacaatgcctcgaaatcaaggtgggcaatcccgtagctcgtcagcacaacatcggcatgctgatagcaatcccccaggttttcttttttccggttcggcccgtaatggagggcggcatttaagccatttccaaatttttcaatctcccgttgccagttgccgaggacagatgtcgggcaaatgatgagcgccggatttgccggctgttttgcatgcttcacatggaggaggtaagcgatcagctgcacggttttcccaagccccatatcgtctgccagtacggcgccaaacccgcaatcacgcaaaaaggagagccagtttaagccaagctgctgatacggccgcaaatcgccctggaatccgggcgggatcgggacggatggaatttcgtccagattggaaagtttccggatgaatttttttaatgactgattcagttcaatttgaatccgggcgagcgcctgcatatcctctgtttcttcttcgtccgtttcctcttcggatccggaagtttgcgcgagcagatcctgaagatggaggccctcttttttggccttttccatgagcgcctgcagcgaccggatcatcttcggatcaagcgtgatccactcttctcccgctttcacaaagcggcgccctccgtttacgaggttttgaaattcttcttcgctcatttccatcccgtttaaggaaatccgccagtcaaattcgagcactgtattgagattgaaaaaggaccggtagcttgtgttttttttcagttttgctttcagccgcatattggcgtttttaacagatgaccaccaggacggcagcataatttccacaccgagcgggagaagcttttcgctggcatgaacgaagaactcccatgcgcggttttcttcaagttcattgcgcagctgcccgttttcatcttgaagccaggggaacagttttccccatcttgcctgttcgagccggacctcttcttcaaacggctgccattttttatacagcttttgccgggggtagaccagcatccgttccggtttatcacggccgcgcagcacggtttcaagcttccagcgcccgccgtcagcgtccggttcaaaaaggcggatcccaatcgtaaaggggagggacgcttcgcccgcccatagttgaaaacgccgcttgtcaaaatacgaggagagttcccgggaggtaaagcctaattttttcagctccatgaattgccgcttcaatttgggccggctggtgataaaagaacgggcagcttctccgtaccattcggagaggacgcgggacaaaggtttttcatccagcatccggccccaaaacgacgggctgaactcatcgataacggcatcaggtagctctatctcccatgcttcttcttccggaagtgcagccgcctcagcaagccagccgccgcttaaaacggcatcaagcagcacgggagccgcagccaaataaatttgcccgcgttcatcccaatcccagcgcaacatcgaactgaacccttcttttccgagcagggacaaaagcgtaaagctgtcagccaaaatcccgcagcgacttccgaaacgcgtgtacggcataaaggcgccgtaaaaactttcttcatgccacataaacaaagacggcgcccagtaggaaggatcggccccgtttccggcccggtcttcggaaaataagaaatagcgcccgtccggaaccggctgtatattgatttttacatcatattccatctgcatcggtcaaatttcccctcctgcattcttcctgaaaagcgcgcatccgttttgtccgctccttgatttcatcaaagaatgcgtaccaccgttcctcttcatggcgtttccggtaaatggcttttaattttttcaaatagcggacggctttttgataggacttccggtttttttccccgatacagataccgaccgcccggtggtaaagagggagaagggcttcaggcgcttgttttgcaacctgttcgagtttttctttttcaatatctccgggtgtatggccggtaagtgtctggagttccgcccactccttgtatcttgcggatgaaaacaaaacgtccccgtatttcggtgcgctgacaggcaaaaaggcgcggtacagtttttccagcaatttcagttgctgggcggagagcgcctgttcattgatggaacggaaaaacatgcgcatataggcagccctttcgaagtcgtccgtgcaagattccaaaaggcgcgggatcatcgggacggcggcggaaatatagcgggacagcctctcatctgctttcagttccaaaaaccagtacggcatatatacggctgtatgggcgccgcttgcagccagctgcccgagaaaaaacagcgcggtgtcgtcattcccgagcaaaaaggcgagatgtataaagcagagcaccttcagagtggagaggttttcaccggcgtcaatgctgtttaaaatttcctttcttaaacgcgcctcttcctctttccgccaattttctttcttgagcaggcgcgaccagagcatccggtaaaaatcaacggtttccagttcatagatggatgcactgtccgccagctcgcgggtgttctcgcgaaaataagcaataaacggatcaaaagcaaacgggagcgctgcggacgacagccggtttgccgcctcttccgcttcgccggccaaaaactgcatgagagccgcggacgaaaaaaagccatttttcaaacaaaccgtgtgaaggtatttaaacaattcataggcagcggccagtctgtaaagcggttcccattcccgttcgaccggcaaaaaaagggtgagccggcggtaaacttcccttgccgagagatcgagaagaaattcatccttcacattgatctcttcaaacgcggtatggaaatcatccagccacatgctgatggtttgcccggttgtttccggcttttttttctccaacaaatcgcttgcccgcttcacggattgcaggaggtccccgtccgtactgcggcgcttccactcgcggacccagtcgaatacactgtttgcttcactgtaggcaaagaaaaacaaagccatcaggtggcggcaaaaaccgtcatgggggcaggcacagtcaaaattcaacgggtcaagcaggtccagctcgcaatccaccggtgtcacatcctggactttcccgcgcaaaaaccgccccgaaacccgtttggcatggacgagatgctggcggtacaacagcagccctttttgcaccagtttctggtgggattcgcgctccggctgcaaccggttctgaagttttgtggcataatcgttcagtaaggcggccatagggcgacacacctccttggaaaaatatgtaaaacaaaaagcagacaggctgcttcggtttgtggcaagtgataattcaactatttagcataatacacatttctgttgatgtccagtgcggaaaagaggggggcagccgcaaccggtctatttgttcttctcgcagacttgaggaaggaaatcaaacaattttgatgaaaacccttatatttttttaaagtttttgctatattaagagtaaggcaagaaaattttcataaaaatttaagaaatgccgtgtaaaatcctatatagatgggaatacatatacagataaggaaacagtacggaaatccatgatagatgaggcggtcgtatgaaaaaaaaccatgatcatttaataaagatgatatcggctttttcggaaatgggaatcaaaacctcctttacgaaatcccggctggaattgttcgaagtgctcgaagggagaaagctgcaaccggtttacaaaaagcattaatttctgttttgcggagcggaaaaacgcgggcgaccaagcgatcgcccgcgtttttggattttgaattggcatcagagggcagctggcgccctccattactcaaaagcttttaacatttcaggatgtccggattcattttgaatcatcggcgtgggttcctgttttgcagttcgtttggccggccgtgccgctttctttttcacttcgatatagcggatatgcatatcttccatttcactgatcgtaaaggtgtattcatcggtttcaaccgtgtcgccctgctttgcctcgaattttttggttaaaatccaaccgccgagggtatcaatgtcttcatcggaaatttgtgtgccgagcagatcgttcacttcgctgatcagtactttggcgtcgataataaagtggccgtccttgactttccggatcagcggcacttcatccatgtcaaattcatcacggatttcaccgacgatttcttccaaaatatcctcgaccgtcactatgccgctcgtgcccccgtattcatcaagcaatacagccatgtgaatgcgttctttttgcatcatgacgagcagctcattaatcggaatcgtgtcaatcacgcggataatcggccgtatatacgcttccagtgacgaagggggagcctgttttttcaatacatcggttaaaacttcctttaaattgatgatcccgataatatggtccttatctccgtcaatgacagggtagcgggtaaaccgttcttcctgcacaaggtccatgaacgtctggagggagtcccctttggaaagggagacaatctcggttctcggcaccataatttctttcgcaatccggttatcaaactcaaaaattttatttacatatttaaactctgattgattgatttccccatttttatagctttcggacaggataaagcgcaattcctcttccgtatgggcgacgtcatgccgggatgcgggttccagcccggccatttttgtaatcaggccggcagaactgttcagcagccaaataaacgggtacatcagcctgtggaacaaaattaacggctttgctgcaagaaacgcaatggtttccgctttttgaatcgcaactgtttttggcgcaagttctcctgccacgacatgcacaatggtaatgacagaaaaggcaaggatgacggagaaaacggcgccaaaagaccccggaagatgcaacagcccgagtacgggagcgagaagatgcgaaacggtttcttccccgatccatccgatcagaagcgaaatgatggtgatgcccaattggcaggtcgataaatactcatcaagatttgtgatgatgttttttaccgaaatcgcttttttgtttccttcttcgatgagttggtcaatccgggaacttctaatctttacgattgcaaactctgaagctacaaaaaaagcggaaagtgcgattaaaataaaaatcagcaccaatttaaatatgtccaaataagtttccctgctccgaatagagacggggcaggagtcacctcctgtatatttgcaaaattaaatgatcctattcccggtttcagcgccagaccacttccttgtttaaaatggaggaaagggactggacgagtgcccggctgtctcctgataattgattgcgcaatgtttctttttgctcttccggcagtttctccagattcggtgtcatatctttcagttccatattgagctgttttaactgttcggaaaagaggttcaactgctggaccagggcatgtgcattcgatatgccgttccttctgcattccagtttgacccggatcgcctcaagcgggagatgcatttttttgcattcttctataaattgcaggtcacttacggcatcttcgtcataaatccggtaatttgctccggtgcgtcttggttttaacagcccaagccgggtgtagtaatcaatggtccgttttgaaacattggcaatggatgctaattccccgatgcggtacaaagccccattggaatcaccccaatctctgaaaaagcacacttatattacgactattataaaacataaataccatacagtcaaacgtaccggttagaaataaaatgtaattaggaaaattcaattagtttaaaagtggaaaaccaggttgggcagccccccgttatgaggaagccgcttcctgtttttttgatacttccacatacaggacgtgcgaaccttccatatcttttactttgaaatcatacgattggaatggcacggaatcgcccttttttaaatcgtatttctgtgtcagcagccatccgccaatcgtgtccacgtcatcatcgggaatttcgatcgcaaggagatcatttacatcttcaatcagcactttggcgtccaaaatataatgcgcatccccgattttttggataagcgggatttcatccgcatcaaactcgtcccggatttcaccgacgatttcctctaaaatgtcctcgactgtaataatgccggcagtcccgccatattcatccagtaaaacggccatatgagtgttatctttttgcatgcgggcaaggacaccctgaatcggcaccgtttcaatgacatggataattggattaatatacggttcaatcgtcgcatcgtcccggagatccgggtttgaaacataatccgtcagcacttcttttatgttgagcacgccgatgatattgtccttgtccccgtctgtaaccgggtaacgcgtatatttttccgattgcgcaagccggatgagatcggcaatccggtcgctcttgtcgacggtgaccacttctgtgcgggggaccataatttcttttgcgatccggttatcgaattcaaatatattgttgacatatttatattcggactggttaatttcaccgttttttaagctttccgacagaataatccgcagttcttcctctgaatgggtgatttcattgtccaattgcatgtcgaaaccgagcgcttttgtcacaaactgtgacgacttgttcagcgtccacgtaaagggatacatgattttgttgatgaaaatcagcggtttggcgacgagcagcacaatcgtttctgctgtctggatcgcaatatttttcggtgcaagctccccaaccacgacgctgaaaaaggtgatgatgagaaaagaaagaataaaggtcaccacgtggatgagtgtcccgggaacatggagtttgattaaaagtggattaaaaatcacccttaatgtcggctcgcccagccacccgagaataagagaaatcacggtgatgcccagctgtgttgtcgacaaatagctgtccaggctggaaattacctttttggcggaagcggcttttttgttgccttccgcaatgagctggtcaattctcgatgttcgcacccttacgagagaaaattccgaggcgacaaaaaacgcattggccccgattaataagacaataatgagcaatttgatcgtcagcatggtttgtcctgccaagagatgaaaaaatgaatcgttttacatggcccctgattcggcaagacatgcacctccttaagagactcttcctgtatactgttcccgaaaaacaggagaaaaaacggggcttgcccgggaacaagaaagtacccgtcgttttctgtatattcctatctatattttgaatcattttaataggaactgcaagcacaagggcgtcttttcccggttaaaaaatggcaatgctggtgagggggtaaacagcagtatatggttttgcatttagcggaaatacattataatcatcagtgaggataaaggatgcccctttttcagataggaatgaaataaaaatccaattttttcgccaactttgttaaaataaaattatgagaactggcgggctttagttcataacatgctttgcacaatcgggggtaatagtttgaaaaaccatggtggcaacagggagctcatttacgttcacgcgaatgaagtgaatcactatgttttatcgcacggcatctgtttttatgaattttaccatgctttccccaatttgacgaatctccttcttcttcggtatgtgtcaagtttttctcgacaaggtttaaatatcgggtattccaagacactctttttgtacactttcggctaccgtgctttacttgctcggtgtaatnnnnnnnnnnnnnnnnnnnnnnnnnnnnnnnnnnnnnnnnnnnnnnnnnnnnnnnnnnnnnnnnnnnnnnnnnnnnnnnnnnnnnnnnnnnnnnnnnnnntaaaattttacacatactcttcttcgtcatcaatttgaggcgggcactgtaaatttacatacgctgtttgaatatgcggatgaagaaacaatcgggcggctgctggaagaagacatatacagctacggggatttttgctgggttgattttgaggatgaggaagggctcgatctactggaggggtatgaaattgcggaattgctgtatctgagccatatgaaacatcatttgcggaggcctttttaccggaaattaaataaccgtttcgtctatttatcgcaggatgacggctactacagcaaaatttatttccgttctttccgtgatttttatgcgatgcttggctgtgtggttgccgagcggatcaacaggatcaaaggagagaagccgtttctgttcgggcggaaaaagcggaaagcgctgcctgctatcccggtggaggtgctgttgcctcttttggataaaatgaaggaagggatggtcatttcaatggaatatgccgtgcagacccgggtgcaaattgaaatcccgttctggacgatcggcgattttcatgatatggatgaaatgcacgaagaatatgccgtcatctccggcacgccaatcgatggaaaaatggtctatgaccgcaggatgcaggaatggaaaattttaatccattagacgcccatgtgcggtgaacgctgtaccagcgcagcagatggatgaaaagcagctggcgcaatgtttcaggatagaaaagcggggaagccaccccgcttttcattatacacgtgttacacaaatgcctgttttgacatacaatagggaagaaactgaacaaatcaaaatggcaaatttggcgcacaccgggtgtgtaaaatgttaaaataggaatatcctgttcgtatgatggaggatgacaatgaaaaagaaaatctgtttgctttacggcggaaaatccgctgagcatgaagtatccctgcaaaccgccaaagctgtaatacaggccttggatcacgaaaaatacgatatttaccctatcttcattacaacggaaggggactggataaaagggccgcttttaaccgggcctgttgaaaccgtgaaacagcttgaattccatgacggaaagaaaatggcccctaatgcgcttttaaccaccgtatcggacgaaaagggcggctatgacatcatttttccgctgttgcacgggccgaacggggaggacggcaccgtacagggcatgcttgaactgttaaatctgccgtatgttggaaatggcgtgcttgcctcttcagccggaatggataaagtgattatgaaaaacctgtttgcgcaagccgggctcgaccaggtgaaatatgtttcttttatccgcagcgaatgggaaaaagcgcccgaaacctgttttcaacaagtggaagaaaagaccggttacccttgtttcgtcaagccggcgaatctcggttcaagtgtcgggatcagtaagtgtaaagaccgcacagaactggaagccgcatttaaggaagcctttcaatacgaccggaaaatcattgttgaagaaggcgtcacggcaagggaaattgaacttggcgtgatcgggaatgacgatccgcaatgttccgttgccggcgaaattgtcgcgaaaaaagatttttacgattataaagcgaaatacgaagatggggatacggcgttaatcattccggccgaaatttccgaaacggtatataaaaagctaaccgaagctgcgattacggcatttaaagcactcgactgctcggggctggtgcgcgctgacttttttgtgacagaagacgaacgggtgatcatcaatgaaatcaatacgatgcccggatttacgccattcagcatgtttccgcttctgtggaaagaggcggggctggattacccgcagctgatcgaaaagctgattgaacttgccctggagcggcatgctgaaaaacagcggattaaatatactttgtaacgaatttggaaccattgacaatggttcccgttctgttttcaaggaggaaaagagcgaaaatgatcagacggacgatccgggaaatgaccggaatgatccatgtggaaaacggggaagaactgcagcgcaacgaaacgcttgtacaaggtgtatgcattgattcgcgcaaaatcgaaaaaggtaatctgtatgtgccgcttacaggcaggcatgcggacggccatcaatttgtggaggacgcatttcgcagaggcgcagctgcatccctctggcaaaaagatgtgccgaacccgccggcgcacgtgccgcttcttatcgtggaagatacagagaaaagcctgcaggaattggcaaaaagctaccggaacgccttgcgggcaaaagtcgtcggcattaccggcagcaacgggaaaacgacgacaaaagatatggtcgcctccgtcctttccgaaaaatttaaagtgcaaaaaacagaaggcaattttaacaaccaccagggcgttccgttaacgctcctgtcccttgatgaagatacggaaatcgccgtggtggaaatgggcatgagtgcaaaaggggaaatttcttttctaacatcgattgcccgcccggatgtggccattattacaaatattggcgaggcgcatattcaaaatctcggttcccgtgaagcgattgccgatgcaaaactcgaaattacagaaggccttccggaaaacgggctgctgatctatatgggggacgaaccgcttttgcaggaacgggtgccaaacattaccggcatccggacaaagacgttcggcaaagggcacggaaatgatctttatccggtgggatggagacaagagacaaacggcagcgcgttccggacaaatgcttcgggggatatcagttttcatctgcctgtccttggcgaatacaatgttatcaattcgcttgccgccattcttgccggccgcgagtttggcatgccatttgaggaaatccgcgcaggcctagggaaaacgaggctgagcgcaatgcggatggaaatggcggatggcatcaacggttcaaaaatcatcaacgatgcatataatgcaagcccgacgtcgatgcgtgcggccatccggcttgtggagcagtttgaaggaacgggccggaaaatcctcgtgctcggggatatgcttgaactaggtgaaaaggaagcggcgtttcacagggaggtcggccgcagcttgaaccctgaaaaaattgattttgtttttacatatggcaagttgggccgtttgatcgcggaagcttgcgattttccgggcaaccgcgtgtttgcgtttgaggacaaggagcggttgatcgatatgttgaaaggaaaaatcggagccggcgatttgattctggtcaaagcctcaagaggcatgcagctagaagaagtggtaaaggccattacagtttcataaaggaaacagcaaagagcccctcatacgtagtatggaggctctttgcataaaaaggccatcgggcaaaaaccgcacgcaaaaaactatttttccagatagtaaatggccgcttcatacgggcggaacagcgtgcttgtgccagtatcttcatagtttccaagcagcagtttccagttgtcatccggttgatcaaagcttactgtgttttcgcttaagttggcggcaacgagcagtttttccgattcattttccctcgtgtacacgtacaaatgcggatggtccggcatcagcagctcataccggccgtctgtaaacacatcgtatgaatgccgcagcttaatcaaagattgatagtaataaaaaatcgaatcaggctcttgaagcgcttttgccacgttgatctccgaatagcgggaattgactttaagccacggtgttccggttgtaaagccggcattcaaactgccgtcccactgcatcggcgtccgtgcattgtcgcgtcctttttttcggacagctgttaaaaattcatctttcgacatgatttggttttccatcacaagctcttgataagcattccggatttcaatgtcatcatattcttcgagttcgagatcggcgttcaccatcccgatttcttccccttgataaataaaaggggtccctttcagcccgtgcaaaatggtggcaaacgctttggcacattctgcccggtacgttgtatcattgccccagcgcgataccaccctcgcctggtcatggttttcaaaatagagcgcattccagccggtatccgcgagctcatattgccagcgggaaaggatttgtttcaattcgaccaggtcaaaaggcttcaaagcccatttgccggcagggctgcccggtttcgtatcgacatccatatgttcaaaattaaaaatcatattgagttcatggcggtccggccctgtatatttcctggcgatttcgacatcggatccgatggcttccccgacagtcatgcagtcgtattttgacagcacttcgcggttcatttcctggatgaacgcatggaggcgcggcccgtttgcatgatacttgccaatgccgtatttttgcccttccggaagttcataatcaggaaaatcaagaaacttggaaatcgagccgatcacatccatgcgccagccgtccacccctttatccatccagaacttcatcatatcgtaaatctctttccgcactttttcgttttcccagtttaagtcaggctgtttctttgaaaaatagtgcaaatagtattgcccggttgtttcgtcgtactcccaggcggaaccggaaaacatcgaaccccagttgttcggaggggtgccgtccggtttcgggtctttccaaaaataaaagtcgcggtacggattatccttcgatttccggctttcgacaaaccaggcatgttcatcggaggtatggttcacgacaagatccattacgattttgatcccgcgtgcatgggcttcgtcaagcaggcggtccatatcttcatttgtcccgaacatcttgtcgatcttgcggtagtcacggatatcgtagccattgtcatcctgcggcgagtcgtacaccgggctgatccagatgcagtcgatcccgagtgttttcaaatagtcgagcttatccataattccccgcaaatcgccgatcccgtcaccatttgtatcataaaaactgcgcgggtaaatctggtaaacaacggcttttttccaccattctgtcatgaaggctcatactccttcgtgtacgtatttgctagatggatgaattccccatataacttcaattgaagcggtttgccttccagaagggagacggcgacttctcttttgttcactttcacttcaaggaggcggtgccggtaattgactttaaatgcgtattcatcccagtctttcggcaaaaacggcgcaaacgacaaggtttcatggaaggtgcgcatgccggcaaacccgtggacaatggagagccagcttccggtcatggacgtgatgtgcaacccgtcttccgtatcatggttatagttgtcaagatcaagccgggatgtgcgtttatacagttcgaccgctttgtcttctttccggagctcagccgccagaatcgcatggacgcaaggggagaggctcgattcatggacggtgagcggttcgtaaaattcaaaatggcgccgcttttcctctattgtaaactcatcattgaagaaataaaacccttgcaggacgtctgcctgcttaatataacaggagcggaggatccggtcccatgaccagtgctggttgagcggcaggtcttctttcgggaggcaggcggccggtttgatcggtttatccaggaagccgtcctgctgcagaaaaatgcccagctcttcatcatacgggaaatacatccggccgataatatcctgccaatgcgcgcgttcttcatccgtaacattcagcgcggctgctttttccgcaccggcaaaatcaagggacgcaagggtgtatttaagcgtccagacggcaattcggtttgtgtaccagttgttgttgacgttgttttcatactcgttcgggccggttacgccatggatcatgtatatttgctttcgctcggaaaaatggacgcggtcggcgaaaaagcggctgatgccgacgaggacatcaatcccgtactggctgatataggctttgtcgccggtgtaattgacataattgtaaatggcataagcaatggcgccgttccggtgaatttcttcgaatgtgatttcccattcgttatggcattcgattccggtaaaagtgaccatcgggtataaagcgcctttcagcccgagtttttttgcattttcatacgcctcggggagctgatggtagcggtagagcagtaaatttcttgtgacttccggcgtggcaacagacagatacatgggtacggcataggcttctgtatcccagtacgtcgcgccgccgtatttttcgccggtgaaacctttcgggccgatgtttaagcgcggatcatcgccgtaataggtcgaaaaaagctgaaataggttaaagcggatcccttgctgggcttccggatcgccggaaatgcggacgtctgctttctcccaccgtttatgccaggctgctgcgtgctcctcatatagcttttcgtacccgttttccaaagcctgttcaagcaattcgtaggcgcgggagaggagcgcatccttttcatagtcccggcttgtcgtgacagaaaccattttatccagaaggagcgactcgttttcgccgagcgttttttcatatacatggccggcataaagcgtatccgactcacaggaagcaagcgttgcctccgtcagattgcccatggcggcggctacggtaaaacggggaacgccaaacgggttttcaattgtttccgtgacaaccgcggccttgtcttccgttgcctcagaccggatttccgtccagaacatttcatcataattggcgtcttcgtttttgacattgccatccagaaaaggttttaatgtgagtacggccggattgccaagattggtggcacggattcggatcgcggcaatttctttatggacaatgctgaaaaaacgttcaaattcaattttgactttcttgccggacttttcgacaagataggaatggcgcaagacggcatttttcatatcaagttccagctgaaattgttcgagcgggtccagaaacaggtcaatttcctcttgatcaatccagacgcgcaacccggcaagattgaccgcgttaatgacttttccgaaataatcgggatagccgactttccaccagcccacccttgttttatccgggtaccagacccctgcaatatatgtgccctggtgatgatccccggaataagactcctcgaaatttccgcgcatgcccatatagccgtttcctaaagaagtgatgctttcctgaagccggatatgttcacggtggagcttcgttgtttttaaagtccattcatctacatcgaaaagtcggttgtaatacattagaaatcctcctcgtcagcattttgtacttacatgtcgtccgtcagaaattttgtttttaaaaaaatcatcgcaatgaaaagcaccatgcccagtgattggatcatcatcatagttgcagcacctgcgccggcaaagcctgccaacatggcaataatggatggaacccctgctgcagacagcgtaatggttgcagcctgtttcaatgaccggatgccggaaaaacttgaaaaacgtgtcaggcaaagtatcagggacactgcccccatcaatagcatattgctgaaaagaaacaggattccgatcaggcatgaaacaagcggaatcaggatgactttatgttgccggaaccagagagcgccggcaaaagaagcaagatcacggccgttttggatgatgatcttctcgtttccggccgggtagcggacggaaaagccaaagccgttttcatcagtcagaatgagccggtctttccggaaaaggagcgcatttttgtaatgcgcgacttttgtatggtaacggctttccgaaacggccgtggttttgcgcggatcaaaggagataatcgtatctccgtgctcctttgtccacgcgttgccggattggagcacgccgttttgaaaggaaaggacggcgtgctgcccggtatacccggtttgtatcgctgcatttaaatgcggcgccacttgctctaagctgatatttcctgcccgcgcaaaagagagtgaaagcggggcaatcaggcaggcgtttaaaaagagaaaaatgagaatcagtttccaaacgctaagcgcaccccggtaccggaaaatttttacaggtgaaacgatcatcgcaaaataaccagcagggaatctttgaatctgttccataagcaatcccacatttcaataaagtatgctatgttttttacaagttttttccgcccgggccggcagctgttaaagctgtccatcccgttacgccctttatccttttgtgccgcccgacgtcagcccggatacaaagtttttttgcaggaagaaaaacaaaatacagattggcagcgcggctaaaatggcgccggcagcaaagagcgtcaccttttgctcggtcgggttggaaataaattgctggaggccgactgccacggttaaatgttccggtgtccggagcaaaaatttggccagcaaataatccccgaacggccccataaatgcccagagtgcctggacggcaagcatcggtttaacaagcgggagcacaatttgccaaaatatgcgcaaatggccggccccgtcaattcttgcagattcgtccaaatcgcgcggcaccgtatcgaaataccctttcatcagccacgtattcattggaatgccgccgccaacataaagcaaggttaaaaaccagtacgtgtccagcgcgtccaggatattcgccagtacataaaatgcggtcagggccgccattgtcggaaccatttggatgatcaggaaaaagacaaggctgtactttcttcctttaaaacggtagcggctgtaagtgtagccagcaagggtcacgatgacgacctgcaaaaccatcgttgcaaccgcgatgataagcgtgtttttataccattccggatacagcgtctgggtaaacagctggcgaaaattgtccaatgtccaatgggaatgaaaatccagctggaaggaaacgatattggattccttgaaagcagacgccgccgtaatcagcagcggatacagaatgattacacttaaaagaattaaaaacgcataggtgaaaaaccggttccagaaacgggtgaatttttgatttttcattaacgccttcatcctacatcatctcctcattgccgaaagcgttcgtctttttaaaggcgatcatcgagacggcaattacaataaatgaaatcataagggtaatcgccgctgccatcgcgtactgcggcgatgtcccggtcgtcagtttataaatccaggaaattaaaatatcgctcgccccggctcccgctccgacactgcccggcccgccgttattaaagagataaataatcgagaagttattgaaattaaatgtgtactgggtgatcagaacaggcgcggtggcaaataaaatcatcggcagggtaatcctgcggaacttttgccagaaattcgcgccgtcaatgatggcggcttcgtataaatcgcccgggatcgactgcaggacgccggtgaccatcacataaatatacgggaaaccgagccatgtctggatcatgatcaaggccacttttgtccagaacggatccgttttccacgagatggccggaatgtcggtaaacggaagatggttgagcagcggaatgacctgggcattgatggcgccgatactgtcattgaaaatattggaaaaactcataatggtaataaaggctggcaccgcccacggtagcaaaaaaatgatccgaaacagctttttccctttgataaaaggctggtttaccacacaggctgttaaaatcccgagcacaatctggccggtggtcgcgcataatgtccagatgattgtccagctgaacacacttgtaaacgtggcccgatacgagctaagtgaaaaaatatttaagaaatttttgatcccgacccagtcaattaggcggaaaggcggaatatgataaaaatcatagtttgtaaaagcagtgaacagcgtcacaagcaccggaaaaatgatcacgaatgtcatggccacataagccggaatcgtcagcaaataagggaagcctgcatcccatgcattttttaaaatggccttggcagatgtgttggctgtcccctttaagttccagatggcggcaacacgccgggcatcataaatattcagcaaataaaaagcaagaaaaatggcgatcaagatgatttgcagggaacccttgatcagcagaaacagcgaatggtcaacccgcgggacagaacccagcgtgataaaaccgttcattgccgggatgcctgctatgaccatttggatgacaaaaaggataaaaatggccagaaaaaggacgcctttaaaaggctgcttgttataaaactggccgagccccgggatcagggaataaaagcctgctttgcggacgtctttcagtttattctgtgcagtttccattttttattgcctcatttctttattggtctgctaaccattttgaaaaccaggtgggggagtgccccacctggaaatgaataaagcggtctatttattggaatacttttgggcaatattgtctttgatcgtcttcaccgctgcatcggctgcctgctttggtgttttcttgccgctcgctgcgtcaaacatcgtcgattccataccggtccagacttctgccatttccggaacgtttggcatcggctgggcatatttgtactgttcaacaaccgcttttgtcagttcgtcaaaaggacgagcgtttcaatgacgaacgggacgccgtaaactttgttgtcgatcatgacttggcgctggtcttttgcatcaaaggcgctgacatcttttttggacagtttaagcagatgcccctgctggccgaggccaccgatccggtcataaggagcgagcatcacatccggggcttttcctgccgggccgtccaaaggcagtgcttccagttggtcaaacatcggctttttgaccacttttacagtacaattgtttttcttttcaaaatcgcccttaatactgttgacataatcggcatatttttcttccacggaaaccgtaagcgtctttttgccgccgctgtcttgagaagatccgctgtttgtttttttcgatcccccgcacgcggcgagcgccatgatgacgcccaagacaagtgtaagcacgaacagcttcttgaatactttcattttatgaacctcccttttttggtacaaccttattcaaccttattatagaagagagtagaaaacgattacaatgtaaaattttctgttaacggtaacagaataaaaagccccctgctaggtatccggcaagggggagggttagtttgtgatttttagaaacgcaatgggaagcgacgaatgggtttcacgaacgctccggccaggtcagtttgtgatttccagaatcgcaaagtccattggcgggaggacaagggttttgtttggaaccggtttgttttcccacgcgtcttttacggtgtccggttttacatccagctcgctccacgggatggcctgttcttggtccgaacggttaaaggcaaacagcaaggtgcatttttcccctttgcgcaggaagctgaccacttgtttttcgttatcggttttcagccagacgagatcgccgtatgtcaaggtttgttgatggtctttccggaagcggatcagctttttcataaatgcgagcatgtcgcggtcctgcttgtcttcatcccagaccatgcatttccggcaaagcgggtcacctgcgccgtctattccgacctccgtgccgtaataaatgcacggcgaaccggtatgcgcgaacgtaaaggcaagggcaagcttcaccttttgcttgtcgccgcctgcctttgtcaaaatccgcggggtgtcatggctgtcaagcatattaaacaaaacctcgttgttggactgcatataatgcataaactgctggttgaggctgtgcatcagtttttcggcggaaattttttcatccacaaagtattcaattattgtctgcgtaaatggataattcatgaccgaatgaaactcatcgcctaaaagccaaggccatgcatcatgccaaatttcgccgagaataaaaacatccggtttctcgcctacaacggcctggtggaactttttccaaaaagcatggtcgacttcgttggcgacatcaaggcgccagccgtcaatgtcaaattcacggatccagtaagtcgcaatatcgagcaaatactgttgcacttcgggattggccgtattcagcttcggcatgcttgtcgtaaaagcaaacgtatcaaatgagagcgtatcctgcccgtcaatgttcccgttttcgccttcgcggaccgggaaagagtggatatggaaccagtctttgtagcgcgatttctccccgttttctagcacatcctgccactgttttgaatttttcccgatatggttgaacaccgcatcgagcataatccggatcccgcgtttgtgggcttcttccaccagtttgcggaatgtttctttatcgccgaaatgtgggtcaatcgtaaaatagtcgaatgtatcatatttatgattggaaggggcttcgaaaatcggcgtcaaataaatcccgttaatgccaagatcggcgagataatcgagatggccgatgatcccctcgaggtcgccgccgaaaaagtcgtccacgcccgggtctttgcttccccacggcagggcattttccggagaaatggcgggatttccgtttgcaaaccgttcaggaaaaatctggtaccaaatggtggacttcacccagtcaggcgccttgaacatatcggtttcgtgcataaacggaaatttaaaataatagtcgggcacccgcagtgtatcttcatttaccgggtaaaagccgcgcccgccataaaaaatgtcgctgccatccgtgccggtaaggataaaggcgtactgcaggcggcggtgcggcgggcagacttcggcaaaccagacatcgtgcgcctctgtttcagcctttttttccatttcaaggcgttcagattcccagtggtattccccgtcttccttttttttaaataaatacgggtctccccaaatgaggacggctttctgaatgtccccttttttcgtgcgcagcttcaggtgcatcgtttttttgtcatatatatacgcatccgcgctgaacggctgatgaaaaattcctgcaaattccatcttttctcctcctcttatgctacatttgtaataagacaaagcattcaaaaggcgatagcatcagtttgcttggcaccgctttgctatgatagccgttgttattgagcaggcatgcccatctgtggcgggtaagttccgggcaggtaaaggtctgcagttttttcgatgtattgcagacaatcatggcacagctgccttcatgcttccgtatatacgcgtagatgtccgggtcctcatcagccagcatttcccagctgccggccgtaaagacaggcatggattttttcagttcgatcagcttccggtaataatgcagcacggagccgggatctttttcctgcgccgctacgttcacggtccgcgtatcttcgttgatgccgagccacggagcatatgtagaaaagccgccgtatcgatcactgttccactgcatggcgcctcttgaagtatctttggaacgctgctgcaccatttttaaaatttcttcctccgcaacgcctttctttttcgcaattgtggcgagccctttgatacttgggtcttcatagtcttcaagccgcgggagcttcaaattcaccatgccgatttcttcgccctgcagcaaaatcggcagcccccactgcaaatacatcaaagtggcaagcatctttgcgcttttttgccggtatttgccttcgtccccgaagcgcgacaacgcccgcggcatatcatgattattccagtagagcgaattgaagccttccccgtacaggtcattttgccaccgggacatcgcttttttaaaagcaagcaaattccattttccctgttgccagttttgcggaatgccgggtttttttgcttccgtgtcaaaccccaagtagttaaaggtaatgatgcagtcgcattcttcgcggtccggccttgaataaagccgggcaagcttcgtgtcggcggaagctgtttccccgattaaaaaagcttccggatgcttcgctttaattgtacggttaaattcacggatataatcatggacacgcggcaggttggcataatactgttctgcaagcacaaacgcttcttccgagtttgttttaacgggaagaaaacgggtgtcctttgccaggtgaatgaccgcatccagccggaatccatccacacctttatccagccagaatagggcgatttttgccatttcttcgcgcacttttttgttctcccagttcaggtcgggcattttatcgctgaacagatgaaaataatattgcccggtctgctgatcaaaggcccatgtgctgccgccgaaaaagctcgcccagttcgtcggttcacgcccttctactgggtcatgccaaatgtagtaatccctgtacggattttctttacttttccgcgcttcccggaaccacgggtggcggtctgacgtatggttcagcacaaggtccagaatgattttgagcccgcgttttttcgcttccttgatcaggtgttccacatcttccatcgtgccgaaaaccgggtcgattttttcgtagttgctgacatcatagccgttgtccacatgcggcgattcaaaaattggattgagccagatggccgttgccccgagatcgcggatataatccagcttttcaatgatgcccgggatatcgcccacgccgtccccgtttgaatctttgaaactgcgcggatatacctgataaatgacatctttccaccacgcatcttgcaaagcggttcacctccacgtttcttctatactctttcaacgtatcatcacccctttatgcggaacaactttttcagcggtgttaccgttaacaaaatactttttacgggtttgattggcccaagcccatcctgaaaaaaataagcaaccggtgtaagactgcttattcacagacggtggaggggcggatgaccacttccggttcaaaaaaccggtgtccctgggatttcccgttttcctgaatttttttcaacagcatacgtgcacacgcttcccccatttttacaacgggctggcgcacggttgtaatatggggggcggaaatccggtcaagaaacaccccgtcaaaaccggtgactgcaacctcacttggtatggcgagctgcagcgattgggcggctctgatcacaccgagggcaatccggtcgcttgcgcatacaaacgcgcatctttccttccggctggataaaattttttccgcttcttgctgggcggcgcttgaactgtttttgaccctgcaaagaaacggcggcaatccgtttgcttcggttgcatccagataacctttttgtctcgcaaacataaagggctcttgcaggtcaatgccgaaaaaataaatttttttaaatccgcggcgaatgacatgctctgttaacagccgtacgcctttttcattgtccacatcaataaaatcaaaccctctgtcattttgcccgaataaaatcaccggtttggaaaattcttttaaaatggtatcgtaatcctggctgcggacacccgtcgcaatcacaccgtcgcactggccgatgtccttcgatttccgtgtgaccagctgaagcgagtagtggttttggtcgagctccttggcaatgccggtcagcaagttcatataatacggctctgtcgtgtctatttcttccaatatcatgaacttgatgacctgggtacggttggagacgagggcacgtgccgcataattgggtacatagttcaactgctccatcgcctcatataccagtttttttaaatcatctctaacctgttcggggtggttaaggacccgtgaaaccgtcatctttgaaacattcgcctgttttgcgacatcggaaatggtagccatcacgcctcaccctttatttttcagaagaaatgcgctttcgattttttcaaagttaagatcctgcgtcccttcaacaaggaaatccgcctgcttcatgttttccgacgtgccgaccccgactgcaaacatgccggccgctttaatggcctggatgccggcttccgcgtcttcaatgccgatgcaaaatgccggatccgcgttcagcttgcgggcgccggttaaaaagatttccggatccggcttaccgtgctgaatgcgggcagcgtccacgatttcatcaaaaaaggaagccacccccagtctgtcgatgacaaacatagcgtttttgctcgcggaagccagcgctgttttgattcccctttcctttatatcttcgagcaggttgtggatgcccggaagcaaatcggcaggggaaatttggcggatcagttctttgtaatattcatttttcctgtccgcgagctcgttcagcttttcttcggaaaaggaaggctccggccgggcgttctccaatattttctttaaagagtccatgcggctaagccctttaagcgcttcattaaaatggcggtcaaaaggaatctgcagctcatcagccagctttttccatgctaagtagtggtattccgcagtatctgtgatgaccccgtctaaatcaaagagaacggcttggatatgtgatgctcccattgacaattctcctccaacttataaagtttgattgctgttatgattagtatacgggaaatttctcttgaaaactatagaactatataagttgcttgtcgaaatcagcagaaaaggcgaaaaagatccggaaaaagcgaaagaaccggcgaaaagagggaaaacccgatgcacttcgaaaagcgcggtttaaatgaaaggattccatgtccacttcaaaaatcattcctttatttgaaaaaagggtgactgaatcggcaaaaagggccggacgggaaaaaagcgggcggagagcaagaacgggctgattttttccggaaaaccagcgaaaaggtacaagagtccggcgggccttttgtttgcttatgctacaggctcttgaccgcctgaatgccgaaataaatgccgaaaccgacaagagacaggccggacagcctcgaaatgaaaagaatcaaacggttggttaacagttttccgaagctgcttgagacggcagccatcgaaaagtcccacagcgccaccccgataaagatggccaggctgtagaggagaaactgctgtgggcctacggattcagctgtttttgcaagcacggaaccgtaaacgccgagccagaataaaatggtgagcggattggtcagagacattagaaaaccggtcaggaatgattttgacaatttttctttgtttctcatcaaaccggaaatcggctgattggctgcaatcatgctttcaatgccggtgtatgtaaggacaaagcatccgaaaaaccaaaggaatgattttacaaatccgatgctgagcaaatggacgacaccgagataaacgagcagcatatacaaaccgtctgctgccatggcgccgattccgagcagccatgagtggagaaagccatttttaatccccttgtcaatttgagcggcattcaccggcccgatcggcgcagcaagcgatagccccagaaaaatataactaaacatgctttccatcattttccccagcctttccatcatgcgattgatatatttgtattcagaaaccatagcctgtacaactaataaaagcaaaatggatgccataaatggaaaaaatgaacccaaacgatgaaagtgcataaacagagtcgatgggttaaaagtgcgccattattcttccatggattgaagaaataaaaatcttaaattgcaatattaaatgcaacaagtattgaaagaccagataacccatgattaagtagaatcgggacacgctgcgcaacttgacgtggagtggcgggcatggtagcttggttggcccagccagtaccgtatacctggcttcatggctggtagccatgcccgcagaggctctttgtcaagttgctaaaaaccaaccctttgggttagctggcttaaggttaagaagctaagccagctaactagcggcgaccattggtaccgaaaaattgaaagtcccaaaatgattgtgaaaaaaccacggctccatattcgttgaaatcttgccgtattcatgttacgattaccgtacatcgtttacgcttttagctgacaatgctcaaaagagtatattttgttgccgaaaagggtaaaaccctaaggaagacatgcggccctgttgaacgtttagaaggagattgagaagattgacgaagttttcagaattaaatttaagcccggcgattttaaaagctgtgaaaagaatgggatttgaagaggcatcgccgattcaggcagctaccattccgctcaccatgcaagggaaggatattatcggccaggcgcagacaggtacgggaaaaactgcagcatttggcataccgttaattgaaaagattgatcatagaagccgtaatattcaaggaatcattatcgcgccaacacgcgagcttgccattcaggtatctgaagaattgtaccggatcggccaggattcgcgcgttcatgtgctggctgtttatggcggtcaggatatttcgcgtcagatccgtgcgctgaagaaccatccgcaaattattgtcggaacaccgggacggattcttgaccatatacaccggggaaccttgaaactcgaccatgtgcatacgcttgtgcttgacgaagcggatgaaatgttgaatatgggctttattgatgacattgaagccattctttccaccgtgccgaaagaccgccaaacgatgctgttctcggcaaccatgccggatccgatccggaaaattgccgaacgattcatgaacaacccggaacttgtccgtgtgaaagcaaaagaaatgaccgttccgtctattgaacaatactacattaaagtccaggaacgtgaaaaattcgatgtattgtcaaggcttttggatgtacagtctccggaccttgcgattgtgtttgggcgcacgaagcggagagttgatgaactggcgaatgccctgaccttgcgcggctatcttgcagaaggtattcacggtgatttgagccaggcgaaacgcttatcggtactccgaaagtttaaagacgggaaaattgatgtgcttgttgccaccgatgttgcggcacgcgggctggatatctcgggtgtaacccatgtttacaattacgatattccacaggacccggaatcctatgtgcaccggatcggaagaacgggccgtgccggacgggaaggcatggcaatgacctttgtcacgccgcgggaaatgggctatctcaaaacggttgaacagacaacgaaaaagagaatgctcccgatgcgcccgccgacctgggatgaagcgtttgaagggcagcagcgcgtcaccatggaacggatcggggaaaccatcaaagaaggcaatattgatgaatatatgtcggtagcgaaagagctgcttgcagaatatgacccggctgaggtcacggcagctgctttgaaactgatgacgaaagagccggataaaacaccagttcatatttcagaagaacggccgcttccgcataaaaaagaccatagcagacggggcaagcctgcagggtcctacaaagggtcttacaataagggaagaaagccgagaagaacaacaacaaaccgcaaaccattttaaccaaacgaaggcggggccaaaaaaatagagcatcatcagctttacgagcgggccggtttgtatccggctgcgactctttacaagtaaaaatgccggtatggcaaaagtgccggcgccccattaaaaaagcaacggcagctcccgttgctttttttaacggctttctgaaagaagtctcccatcctcaaggaatgtgaaggtgcgaatcgcaccaatgagtaggtgggagatgaatttcggttggctttagccaaaggttttgatataatcagtcttagatggaataaagggtttatatatcaatgaaattagatagtgataatcattcagtattcttactgcattatcaccttgtattggttgtaaaataccgtagacaagtgttcgatagcaaaatatctgattttgcaaaagatatgttcgctgagattggaagtaaatacaatatttctttagtggaatggaatcatgataaagaccatatccacatcttattcaaagcaaatcctaactctgaactatcaaagttcatcaacgcctataagagtgcaagttctcgactgataaaaagagactttccacatataagaaaaaaactatggaaagaaatgttttggtcaagaagtttctgcctacttacaacaggcgacgctccaatagataccatcaaaaaatatattgaaaatcaaggtcaaaagtgaggtgaattgatatggccaagcaaaacaaagctttcaagtttcgtttgttaccaaacaaagaacaatccgcattattagctaagacatttggttgtgttcgctttgtctacaataagatgttagctgaacgcaaagaaacgtatgaaaagttcaaggatgataaagaatcgtttaaaaagcaaaagtttccgactcctgcaaaatataaaagtgaatttccattcctaaaagaagtggattctttagctttggcaaatgcacaaatgaacttacagactgcttataagaatttctttgaaggaaatgcggattttccaaagttcaaaaatcgtaaagcaaaacaactaagaagtgttcatgttgcggcaaggaaaaagaaatgccattatctgaacgtgtatataaatgttcttgcggctttgtattagatcgcgatcacaattcagcaatcaatatcaaaaatgagggattacgcttattagcgttatcataagtaacaaaactcttggaacaagagggttagctcggtcagttttcgttggctagtaaaagcaacgataagtcgagaagcccccacttcaatcaaaccgtaaggttgataagtggtgggtagttcacgcgggagaagccgcttttctttgcaaaagcatgcctccaagcagcatgccggcaacgagtccggaaagatgggctgtatgattggcgccaggctgcatcatagccgttacaacggaaatgaccgcgatcgataaaatggtttgccggcttgtttttggtatatcttctccgacccagacaagggcgacatatgcgccgattaggccgaacagggcaccgctcgcaccggcatgggaataggtaagcggaagcagaaaaaaagaagcgagattggcgccgcatccgcagccaaaatataacaggataaacttccattttccggccagccgttcgagacaggggccgagcagcaaaagggagaaggaattcaacagcaggtggctgaaatcaatatggacaaaaacaggggagacaagccgccatatttccccttgggcaatataaaggttcacaccggacagtgcttcataaagggtttgtgttggtaaaaccggaagccgcatggccgcaaacaggagccactgggccaggaaaatggcagatacgacgggataggaaccaataaaagcagaaaagcggatcgggcggatcagcattgcaaatactcctttcaatggaaaagctctatttatacatatgccggaaatgacgaattagacgtccggtttgcttctaaccgcaaccgccagcaggatggaaaaagggatagcccaaatccggctcgtattttcaaaaagggccgaaccgccatcatggataccagcagaacgatttaccggcgcatattttcacggaaggcagaggcaccgacagcagtgtgaaaatcgggtatcggaaattttgtggtttatactctggaaaaacagaaggtgagcacatgatcaaaggcattggcattgacattgtcgagcttgaaaggataaaaaagctgtatgaacggcagccgcggttcccggggcggattttaacgaaagtggagcagcaacagttcggcaaattggcagaaaaaaggaaaattgaattccttgccggcagatttgcggcgaaagaagcatattccaaagcttttggcacgggaatcgggggtgcgttatcttttcaggaaattgaaatcgcaaaagataagaacggccgcccgtatttttcaaagccggcagggccccgcgcccatttgtcgatcacgcacagccgtgaatgtgcattcgcccaagtgattctggaagactgaagctataacgttttttcaattccccatcatacaggcccgggttgtctcatatattcaaagtaagagaggagagacaaggcacgggcttttgatgaagcctttctcttcataagatttgagacaataaaggggttgaaaggatgaagagaaagtactgggttttgtttgcggctctgtttgttatttttctgctttccgcctgcggagcgaaaaaaccgcaggatgtggccggaaaattaaatgaaaaagtggagaagatggacggctacaagctgaatgcgaaaatgacgcttgaaacgggcaatgaaccgcggacatacaatattgaagtttggcacaaccggccgggatattaccgtgtcaacctgaaaaatgcgggcgaggggcaaagccagatgattttgcgcaataaagaaggcgtgtttgtggtcacgcccgcccttaacaaaagctacaaatttcaaagcgactggccgaacaacacaagccaggcgtacctttatgaatcgcttgtgaaagacatattgaaagataaagaggcaaagatgacggtgaaaaagaaccgatatgtgtttgagacgaagacacgctatcaaaatcataagatgctgccgtaccagcaaattacttttgacaaaaggacgcttgcaccagtcagtgtgaaagtgatggacacggaccgcaatacgcttgtcagtgtgctttttacaaaagtggattttaatgcaaaattcgacagcaacgcgtttgacacgaaaaaaaatatgacaggagcgaaactcgaagtgccggtggatggaaaagtcggcaacaaagagttttcggtaaaatatccaacggcaaaaatcgggggaacgacgctgctcgatgaacaggaagttgccgttgcaaacggtaagcgcgttattttgacctatacgggcgataaaacgtatacgctgattgaggaaaaggcagaggtacttccagctgcttccacagaaccgcttcctgcaaacggggaaatggcggatctcgggtttgcgttcgggatcaagacaggtgactccctgtcctggacggtgaacggtgtcgaatacacgcttgcctccaaatcgctatcggctgcggaaatgatggaagtcgcccagtctgtcggaggagaaccggaaaaataaaatgcggataacccgttcgtaagcacaaaaagcacaagcccgcagccattctctgcgggtttttttcttgatacggttacagcacgtctcttccggtaacccgctccaaaccggtttgataagacttctttttaaaaaccattgacaacgctggctacgcgttcgataatcaggatatggaatcataaaggaagtgtaatcatggctttttaccgggatacatgggtggaagtcgatttggatgccatttcggaaaatgtcggaaatatgcgccgccttttgccggagcatacgcaaatcattgcggttgtaaaagccaacgcttacgggcacggcgcggaatatgtggcgaaaaccgcgcttgcatccggagcttcagcgctggcggttgcatttttggacgaggcgctcgcgttgcgaaaaaaagggattaccgccccgatgcttgttttgggggcaacccgtccggaagatgccggaattgcggctgaagaaaacatctccctgactgtttttcaaaaagactggctcgaggaagcaagctggtatttaaccgggcggaaactatccgtccatcttaaatgtgataccggaatgggccggattggcgtaagaaccgtacaggaattaaaagaagtggaaaaaatcgtgaaccaacaatcttgtttcttttttgaagggatttttacccactttgcgacagcggatgaaatcgatatgactttgtatgaaaagcaatacagccggtttcaggatatggttttaaacctcgaaacccgcccgccgtatgtgcactgcgcaaacagcgccgccgctttgagatttgaccagtctccgtttaatgctgtccgtttcggcattgcgatgtacgggctctccccttcgcccgaaatcaagccggttttgccgtttccgttaaaagaggcgttctccctccatacaaaggtcacgcatgtgaaacaaatccatgccggggatacggtgagttacggcgcaacctatcaggcttccggcgatgaatggatcgccacgcttccgatcggatatgcggatggctggatccgcaggctctcaggccaggaagtgatcatcggcggggaaagagcgcctattgtcggcaggatttgcatggatcagtgtatggtaaggatcccccgtccggttgctgtcgggacaaaagcaacgctgattggaaaacagggggatttgtccgttcctgttgatgaaattgccaaaaagctcgataccatcaactatgaggtgacctgttccatttcaagccgggtcccgcgcgttttccggaaaaacgggaacgatgccgcgggcgtgtcgaatccggtccttgaagggtgaaaaatgttttggcgaattttgaataatggcatgatttttttgccgataatagacaggaatggtgatttgacctttgcatatagtgtatttgatggtatgatgaaaagggaatggaaagcagaaacggtgtctagtgcgtggaggtgtagcaggtgtctgaacctatttcaacagaaattttagtccgcttgccgcagcagctgttgacggaattggacggatttgctgaaactgaaaatatgaatcgcaatgagttaatttaccgtgccacaaaaatgtatttaaaagaacggaaaaaacgccaaatccgcgaaacgatgaggcgaggctacatggaaatggcaaaaattaatttggcgattgcctccgaagcgatccaggctgaatacgaagcagaacatacagttgaaagcctagtaagcggggggtaatcctttgattgttaagcgtggagacgtgtacttcgccgatctatctccggtggtcggctccgagcagggaggcgtacgtcctgtcctcattttacaaaacgacattggaaaccgctttagccccactgtcattgttgccgctataacagcgcaaatccagaaagcaaaattgcccacgcatgtggaaatcgatgcaaagcgttacggtttggaaagggattctgtgatattgcttgaacaaatacgcacaatcgataaacaacgcttaacggataagattacgcatcttgatgaagaagtcatggagaaaattgacgacgccctgcaaatcagcctgggactggtcgaattttagaaacgctctttttaaagggcgttttttcatgctactggctcattgccggctaataaggagcagcttatactttttctgattttttcaagcttcaggccgggtgttgcagttttttcatcgagaattttaccctcttggaatttcacgcctttcgtccggcctgaaattcaaacgtaaaaaatcacatattttttcacgcgtcgggactgaaataatgaaacctgctttcaaaaaatacaggaaaaggggtttaaatctgtcttatagcgggtatatgacaacgttataagacgaacgaaagaaattttccggaaaaatgccttttgcccgatttctgtgccatttacataaaaaaatattttccggttgctggcaaaaacagatataataacatataaatcaaatggatttccctgtttttttcaacaaaccggttcagaaaatccgccggggctaaaggcagcagctcatttgtctttttgcaagccttccggaaaagcccggcatgtctgccgctggctgccaaagacgggcgcttcaaactgttcggagggaagagggttgaccatgcaatcatatttagcggaatttataccggaacataaagatgaaatactggacaaatggatgaaaagcatgaaggaaaaaggtggtgccccatttcatttcgatgaaggtgtggcgtttgaaaaaacaagccgggattttgtcgaagtgattcttgcgcggctgacgaaaagcaatcacgaatatgagaaacagctcggcgagttttccgaaagaatcgtgacgctgggctggccgctcacttttgcaacgaccggcattcaaattctcggggatattgtttacaacctgatgatgaaccacaacccggatgcggtgtttgaaaagcaccgggaattctgggaaatctttcgggaatggaccaatgccgtccaaaatgaatttgtcaatgcctacaccaccatttgggaaaagaccatttcgcttcagcaaaatgcgttaaaggaattgtccgcccccttgattccggtgtttgacaaaattgctgtcctcccattggtcggcaccattgactcggaaagggcaagacagattatggaaaacctgctgtacggcattgtgaaaaacaagtcggaggtggtgctgatcgacattacgggcgtgccggttgtcgatacggttgttgcccatcatctcattcaggcggcaaatgctgtccggcttgtcggctcccgctgcatgctcgttggcatccgcgctgaaattgcacatacgttaacaaatttggggatcaaattaaaccatattacaacaacgagtacactgcaaagaggaattgaacaggctcttgaaatgacagggaggaaaattgtggaatgggagggttgattgatgcgcatacccattttaaagctgggaaactgcctgctggtctcgatccaatgggagcttgatgaccagacagctttggagtttcaggaagatttgcttcaaaaaatatacgaaacgaatgcaagcggtgttgtcatcgacatcacctctattgattttattgactcattcatcgcaaaagtgctgggcgatgtggtcaatatgtccaaaatgctgggcgcaaaagtggtcatcaccggaatccagcctgcagtcgccattaccctgatcgagttggggattacgatggagggcgtcatgacggcactggatttggaaagcggccttgagaaattaaaacaggaattgggggactagctgtatggataaccattcctgtgtaaaaattttgaatgagtgggatattgtggccgcccgccagcttgggagaaacattgcaagagagctccatttcggtgctgtcgaccaggcaagaatcacaacggccatcagcgaactcgcccgcaatatttttgtatacgcaggacaaggggaaatccggattgagaaagttctgcaaaacgggagaaaggggctgaaagtgatcgctatagataaagggccggggattgaaaacatccggaaagtgatggaagacggctactccacatccggagggcttggggcaggcctgccgggcgtaaggcgcctgatggatgaatttgatatcgtttcggcgccgaatgagggaacaaccgttaccgcgatcaaatggatacgatgataggagggaaaaagatggatttccgcgatgccatggagcaggagtataaagaaattcttagccattttctacagcatccggatgaacaggcgctgtaccagtgcgagaagttcagccgcaaactgattgaaaaccggatctctcctgaagacatgattatgtgccatcgctctgttttgcagcaaatcgaacccgggctttccaaaacggtgcagcagtcctttgatgtcctgctggaagtcatgcttgcctacgggctcgtttacagggaacagcaaagcctccggacaaaacaaaaagaactgaagagtgaaatcgagattgctgcgggcatgcagcaaaccctgcttaaggcggatgtcccggagcaggacggcatcgatattggcgtgatcagcatgccggccaaacaaatgagcggcgattattatcattttattgaagatgagaaccgccgcatcggcatcgcgatcgcggatgtgatcgggaaagggatcccggcggcgctctgcatgtcgatgatcaaatatgcgatagacagtttgccggaatacagccaccagccccatattattttggaaaatctgaaccgcgtcgttgaacagaatgtcgacccgagtatgtttattacgatgttttacggtatgtatgacccggtagtacataagttctcctacgcatccgccgggcacgagcccggttttttctatcatgcggaaacggatgaatttgaggatttaatcgcaaaagggctccttttaggcatagaaaaaaaatcgaagtaccatgaatatataaaagatgtgcagcttggcgatatgactgtgctgttgtcagacggcgtaacggaatgccgaacaaaggaagggtttgtcagccgggaaatgattaccagcttgatccggaaaaatatccgcaagagcgcacaggaaatcgtggaaaatgtgtacagggagctggaaagatggcaggaatttgaactgcgggatgattttaccttgctgattttaaaaagaactgcctaaaaggaggtttgtcatcagcccggaaagggtagaagcacttagtgatgaatgttaaagaggtgaaagaattggactttgaagtagatgtaaaggaaaaacagaatgccttaaacgtaaccatttcgggggaaattgacgcatttacagctccaaaattaagagaagcatttgaaccatatgaaggaaaagcaggtttggaagttttaatagatttaaccaatgtttcttacatggacagcaccgggctgggcgtactggtcggtttgttcaaaagcttgcgggcaaacggcgggatgctcacgttgacggggctttccgaccgtttgaaacggctgtttgatattacaggcctttccgacatcatgaagattaataccgaaatagaaggtggagtgtgagacatggaggagtttgatcatatcagtatgaaaatccctgccaaagcggaatatgtcggagtcatccgcctcaccatttccggtattgcaagccgcatggggtttgattacgaactcatcgaggatttgaagatcgccgcgagcgaagccattaccaatgctgtccagcatgcctataaggacaaggaggacggggaagtcaccatcgatttcagcctctatccggaccgccttgaagtaatggtttccgataaaggagacagttttgatctggaaaaagtaagggaactcgcagggccttacacggaagatgtgcagatcgaatttatgagagaaggagggttgggcctttatctcattgaaagtttaatggatgaagtccgcatacattatgatggcggaattacagtcatgatgaccaagtaccttcaaggggagcaggtggagacgaatgtcaaaactgcatcaacctgatcagattgatgtcaatcaattgatacaatcttatcagcaaaacggcgacaaagaggcgcaggaaatacttgtcgcgcgctatcagaaacttgtggagtcgcttgcccgcaaatattcgaaaggaagggcctaccaggaggacattttccaggtggggattatcggcctgctcggcgccattcagcgctttgacccgaatattggaaaaagctttgaatcctttgcgattccgaccatcatcggagaaattaagcggtttttgagagacaaaacatggagtgttcacgtcccccgaaggattaaagaactcggcccgcggattaaatccactgttgaaaaactgacgaacgaactgcaacgctcgccaaaaatcgctgaaattgctgcacatcttgagatttcggaagaagaagtgctggaaacaatggaaatgagcaaaagctaccacgcactttccgttgaccattcgattgagtcggattcagacggcagtaccgtgaccctgctggatatggtcggcagtgaagatgacggatatgaaaaagtcaaccagcggcttgtgctggaaaaagtgttgcacgtactgagcgagagggaacgccaggtcatccactacacgtatattaaaaatttaagccagaaggacacaggcgagaaattggggatttcgcaaatgcacgtctcgcgcctgcaacgccgtgcgatcaaaaaactgcgggacgccatagaaggtgaactgcaacatgtggagaattagccattatgaattatcttagttcaaagcaagtggaagtatacggatttcagacaacaaaggccggccgggacttgtgcggagacgcctattttatgaaggcgacggatgactatttcctctgtgtgctggcagacgggctggggagcggggaatatgcctattactcttcccaggctgttgcaaaagttgtgaaagaacaatcggatgacgatgttgacacgctgatggatgcgtgcaatcgcgctttgtaccggaaacggggcgcagcggttgccattttcaaagcctgttttaaatcgcgcaaatttgtttacagctgtgtcggcaacatccgcttttttatggtggcaccgggcggcaaactgacttacccgattccgattaccgggtacttgtccggcaggccgcagcaattcaaaaccgagatttttgattatgaaccgggttccaggtttatcatccattcagacggcgtgaaagagcggaatgtccaatcctatttgaagaaatgtgaatccatcgaacggattgccgaccagttaaaagaacaacagaccatggatgacgatgctacatttattattgggagcttgcagtaaaggcaagcttttttagtatgtgtaaaattttactcgaaggggcaaatgagtggaaaaaaatgggaagacactctatcatctaaatgtacaccttgaatgaacatctagagagaggtcttcccatggatattatatcaataattgctggattattaaagaatacaaagagtcttatggagtttgaagaacaggttaaaattctgatgcagaaggtttttacacaatgggnnnnnnnnnnnnnnnnnnnnnnnnnnnnnnnnnnnnnnnnnnnnnnnnnnnnnnnnnnnnnnnnnnnnnnnnnnnnnnnnnnnnnnnnnnnnnnnnnnnnactcaagcagcctgtacgcccgtcagtgggcgtaaagcacggatcagttgccctgcattcaagcagttcatcggcaatgggacatttaagcaaaatattagaatattagagctttcgttttaagcttggctcagtggggactgatcgttgaggcgcgcgaaatttacgagactcctgcgggaaaagcgagccaggagagaccccgcagcgaggtacgagcgaggaggctcgccggccgcccgcggaaagcgagtgaatttcgcgcgcctcaacatccccgttgtccatctttatacggaaatatcacatcttttccgaaaattacaccgagcaagtgaagcacggtagccgaaagtgtacaaaaagagtgtcttggaatacccgatatttaaaccttgtcgagaaaaacttgacacataccttttttattttgcgttttttcaacccggaaagcatggtaaaataacagaagaggccttctcctattacaaatgtcaccactggttacattttactctggggtggtgagggcctatctgtatttcaaaattacggttgtgggaagaaacgatgatggcataaagcaattgtgtgtacagctgtttcactggctcaactaagacctgttttcaggagcgaatcattcggaaatctggataatctgtattattatatagctttatgcagattttcggaaccagtaatcagaagtgtggtgttcaatttggaagaaaaacaggaaaggctgatcagccggctgggaaaagaattacagttcccggaaaagagcatccggaatgtcatcggtttgctggaagacggcaataccgttccttttattgcccgttaccggaaagaaatgaccggtgcgcttgatgaagtgcagatccgggacattatggagcggtggaactatttgcaaaatcttgagcagcggaaagaggaagtcatccgcctgatcgatgagcaggggaaattaacagaagagctaaaagggaaaattttacaggcggaaaagcttcagctggtggaagacctttaccgcccgtataagcaaaaacgccggacaagggccacgattgcaaaggaaaaagggctggaaccgctcgccagctggatgctttcgtttccggttgaaggcgatctggatgctgaactggcatcgtatgtatcagcggaaaagcaggtggcatctgccgaagaagcattgcagggcgcaaaagatattatcgccgaaatggtttcggatgagccaaaataccgcggctggatccgcggccaaacgtttaaaacaggtgtgatggcaagcactgtcaaagatgcggaaaaagatgagaaaaaggtttacgaaatgtattacgcctatgaagaaccggtccgcaaaatcgttccacaccgcgtgcttgcccttaaccgcggcgaaaaagaaaacattctgcgcgtatccgttgaggcggacaccgagcggattttggcgtatttgaaccggcaagtgatccggaatgaagcctccattacagctcgaatcgtcaaggaagcggtagaagacggctacaaacggctgattgagcccgccattgaaagggaaatccgcaacgaactgtccgaaaaagcggaagaccgggcgatccatatttttgccgaaaatttaaggaacctgcttctccagccgcctttaaaaggaaaaacggtgctcggggttgaccctgcgtaccggaccggctgcaaactcgcagtcgtggatgaaacgggcaaagtgctgaaaatcggcgtgatttacccgcatccgccaaagccgaaaacagaagaagccaaagcgattgtaaaaagcatcatccgggattttaaggtggaggtcatcgcgatcggaaacggcacagcctcacaggaaacggagcaatggattgccggtattttaaaagaaatagaagaagatgtttcctatgtgatcgtcaatgaagcgggggcaagcgtctactccgcatccgaccttgcacgcaaagaatttcccgatttgcatgtcgaagaacggagcgctgtctccattgcccgcaggctccaggatccgctggcagagcttgtgaaaatcgatccgaaatcggtcggtgtcgggcagtaccagcatgacgtttcgcaaaagaaactgaatgaatcgctcactttcgtcgttgaaacggccgtcaaccaggtgggggtcgatgtcaataccgcatccccgtctcttttgcaatatgtgtccgggctcagcagcactgtagcgggcaatattgtaaaattccgcgacgagaacggcaaattcaaaaaccgggccgaactgaaaaagattccccgcctcggcgcaaaaacatacgaacaaagtattggctttctccgcataccggacggggaagaaccgcttgacaaaacaccgatccacccggaaagttatgatgcggcaagagctttgctgaatgaactgggcatgacgacagcggatatcgggacagaaaagctgatccaatcgcttgaagcgctgtctgtcccggaaatggcgaagacactcggcatcggcgaactgaccttgcaagatatttttgaagccttgaaaaaaccgggccgcgacccgcgcgacgaactgccgaaaccgcttttgaaaaaggatattatgaaactggaagatctgaaaccggggatggagatgcaaggaaccgtccggaatgtcgtcgatttcggggcgtttgtcgatgtcggcgtgaaagaagacgggcttgtccatatttcgaaattaagtaaaggttttgttaaacatccgcttgatatcgtctcggtcggcgatattgtcaccgtgtgggtggagaaagtggacgtccaaaaaggaagattatcgctcaccatgcttccgaacgcttaaaagcgaaaagaagatgcgccggtcatgcgcgcatcttcttttcattgtaaaaaaaccagcattcatttaacagtttaatttcactgcgccttttctcgcaaaaagctctccgtatttggttttgaaaccataccggcacacaaacgcccccttgttcctgaatgctgaaacaaaaccaatcccccgcacttttactaaagtatatgctataataacttgtcatgtgaaaagaaaagcgcgggtgcccgcggcatctattttcattatgagtaagggggcttacggccatggataacaaggaactgcaaggccttgtggaaaaaatatcgatggagtattttcacaaacctttccggcatgcagcctcatttaatccccggctgcggaccaccgggggaagatatttgttaaaaagccacaatatcgaaatcaataaaaaatatttagaagaactcggggaaaaagaactgatcggcattatcaaacatgaactttgccattaccatcttcatctggaagggaaaggataccggcaccgggatgcggatttcaaacaattgttaaaggaaacggacgcgccccgctattgtaccgtcctgccgagtaaagcagcttcccgcccgtcccgccgcccgtccccgcgttacgaatatgtctgcagggaatgcggcatcctatacagaaggcaaagaaaggtcaacaccaaccggtacgtttgcggaagatgcggcggcaaactggtgctgcacaaaatgtatgctgaaccgggccggaaataatgggcatggagcatcttcgaaacaagctttaaaaataaatttcaaaacagggttgacaccttcgtttcccgtcattataatgttaagagtcgacaagatgttgcttgttattccgcagtagctcagtggtagagcaatcggctgttaaccgatcggtcgtaggttcgaatcctacctgcggagccattttggggaagtactcaagtggctgaagaggcgcccctgctaagggcgtaggtcgcgtaagcggcgcgagggttcaaatccctccttctccgccatacatacaaagcagtaatcgcggcccgttggtcaagcggttaagacaccgccctttcacggcggtaacacgggttcgaatcccgtacgggtcatttaaaacttatcatatcatcagtggttccgtagtgtagcggttatcacgcctgcctgtcacgcaggagatcgcgggttcgattcccgtcggaaccgccattgggccatagccaagcggtaaggcaacggactttgactccgtcatgcgctggttcgaatccagctggcccagccatttttgagccattagctcagttggtagagcatctgacttttaatcagagggtcgcaggttcgaatcctgcatggctcaccatttatccgcgggtgtggcggaattggcagacgcaccagacttaggatctggcgccgcacggcgtgggggttcgactcccttcacccgcactgtttagtatgatatgcggaagtagttcagtggtagaacatcaccttgccaaggtgggggtcgcgggttcgaatcccgtcttccgctccataaaaaatgattgacatccacgaaaccctttgatataatgtaaaggtgtcaagttaataacgcggtcgtggcggaatggcagacgcgctaggttgagggcctagtgggagttaaatcccgtggaggttcaagtcctctcggccgcatttacgcgcccatagctcaattggatagagcgtttgactacggatcaaaaggttaggggttcgactcctcttgggcgcgctatttttcatgcaaaaaaagatcggtttccatctgcataaaaagcttagaagcttatcgagcagttgaaaactttataaaaacaggcattggttttatagtttttttgggccagggaaaagcgggaaatagctcagcttggtagagcacatggtttgggaccatggggtcgcaggttcgaatcctgttttcccgatttgcatgcgggtgtagtttagtggtaaaaccacagccttccaagctgttgtcgtgggttcgattcccatcacccgctccaaattttatgttgacagtgacttgttatcatgctatacttaataagttgctgcttgaaattgttccttgaaaactggacaaaacgaaacgtcaaattctttttgagcttttatcaaacatctttactgagagtttgatcctggctcaggacgaacgctggcggcgtgcctaatacatgcaagtcgtgcggaccttttaaaagcttgcttttaaaaggttagcggcggacgggtgagtaacacgtgggcaacctgcctgtaagaccgggataacgccgggaaaccggggctaataccggatagttttttcctccgcatggaagaaaaaggaaaggcggcttcggctgccnnnnnnnnnnnnnnnnnnnnnnnnnnnnnnnnnnnnnnnnnnnnnnnnnnnnnnnnnnnnnnnnnnnnnnnnnnnnnnnnnnnnnnnnnnnnnnnnnnnnagttcgtcaatcttaaaagcactcaaaaaaacggcaaaagaaaaatcctcaaatctgttggaatcgtttcggacacgtattttaacagacgaggatttcacccatttaagtaagccaatacaagtaaggtttacttaatggttatattatagcaaaggatgtgatgtaaaaaaaggtttttttgaagttatccacaattttaaaaaagaaatttgcaaattcggctctttttgactttgaaagcagaaaaaatagatggaaaaattttctaaatgtggataagtcattttatcataaaacatctaaaaattgatgaatttactcttcagaactggaatacaattatttctcttgataaataacagcaactgtgttatactgtttcttgtcattaaggtccggtggcgatggcggaaaggtcacacccgaacacatcccgaactcggaagttaagctttccagcgccgatggtagttgggggtttccccctgcgagagtaggacgctgccgggcctgaatatattattatcgcggggtggagcagtctggtagctcgtcgggctcataacccgaaggtcgcaggttcaaatcctgcccccgcaatcgatacagaacaagcagcggtttgcctgcttgttctttatatttttttatcgtgtttttgcgtaattgcccaaaatcggttaaactagaattggattgaagcatccttaggaacattcctaaggttttttttataaggggtgccgtacttgggattgacggcaatttgcgataaagttgtagaggagaggcggcaaatgggaaattatcgtttcatttccaacagccctgaagagactttttctttcgcggaaaaaatggctgcccatctgaaaccgggggatgtccttctgctggagggtgacctgggggcaggaaaaacggtttttacaaaagggattgcgaacgggctgggcattcgccgtaccgtgaacagcccgacttttaccattataaaggagtaccgggggaaactgccgctgtatcatatggacgtataccgtttggaggatgcacaggaggaccttggttttgatgaatattttgaaggtgatggcgtgacggttgtggagtgggcacattttatcaaagatttgctgcctgagagctatttggaaatccgcattttccgctttgaaggagaccgtaggcttattgaagcggaaccgtttgggatccgttatgtatcattatgtgaggagatttttggatgaaagttttggcaatcgatacttcaaatgaagtgctgggcgtttcattggccgatgatcatgttgtgctggccgaatatatgacaaacttgaaaaaaaatcacagtgtccgcgtgatgccggctgtgcaggaggtcatggtggcgtgcgggataaagccggctgagctggataagattgtggtggcaaaggggcccggatcttacaccggcatacggattggcgtcacgatcgcaaagacgatggcctggagccttcaaattccattggcgggggtttccagcctgaagttgttggcggcgtccggccgttattttgacgggtatatttccccgctttttgatgcgcgcagagggcggatttataccggtttgtaccgctatgaaaacgggattttgcaaacggcagtggaagattgcaatatatcatccgctgaatggggcacccggttaagtgcgctgggggcgcctgtgttattgatcggccagcatgttgcccttcatcaagccgttcttgcggaaaaactgggagacaaaatgacggtagcggattggaccctgcataacccgaggccgggcgaactagccaggctcgggatggatgaaccgggcgcggagatacacactttcgttccaaattacatacggttagtagaggcagaagccaaatggcttgaaaagcataaacgggagagtcattaaaaatggaaaaaacggggaaaataacgctgcggaaagccacgcttaaagatttggacggaatatataatgtagagatgcgatcttttacgatgccgtggacacgtgaagcattttacaacgaactggttcacaatcactttgccacgtatcttgtgcttgtcgagaatgaaaaggtcatcggttattgcggcgtgtgggtcattgtcgatgaggcgcacgtgaccaatcttgcggtgctcccggagtaccggggccggaaactgggagagacgctgttaaaaaatgtgatggcttatgccgcattgaaccatgccgaaacgctcagcctggaggtacgcgtcagcaatatagttgcgcgctccttatacaggaagctcggatttcgggaaggcggcatccggaaaggctattacacggataattatgaagacgcaattgtgatgtgggtgaatttataaatggaaaaagatttgttggtattaggcatagaaacgagctgcgatgaaacggctgcagctgtcattaaaaacgggacggaaattgtttccaatgtggtcgcttcccagattgaaagccacaaacggttcggcggggtggtgccggagcttgcatcccgccaccatgtcgagcagattaccattgtcattgaggaagcgatgcagcaggcaggcgcggcttttaaagacctggatgcgattgccgtgacagaagggcccgggcttgtgggtgcgctgcttgttggcgtcaatgctgcaaaggcgctcagttttgcgcatcagattccacttgtcggcgtccaccatattgccggccatatttatgcgaaccggatcgggcatgagatgaaatttccgctgcttgcgctcgtcgtttcgggcgggcacacggagcttgtgctgatgaagggccatgccgagtttgaagtaatcggcgaaacgagagatgacgcggcaggggaagcttatgacaaagtggcgcggacgttgaaccttccttatccgggcggtccgcagattgaccggcttgcccatgaaggaaagccggatgttgatttgccgcgatcctggctggaagggacttatgatttcagtttcagcgggcttaaatcagccgtcattaataccctccataatgccgcgcagcgcggggaaagcattcggcctgaagatatggctgcaagcttccagcaaagtgtgattgatgtattggtcggtaaaactgtggaggcggcaaaaacgtttggcgtcaaagaagtgctggtcgccggcggtgttgccgcgaacaaaggattgcgcgctgccctttcagaagcattccgggatcttcctgaagtggacttgcgcatcccgccggtccagttatgcacagacaatgcggcgatgattgccgcatgcgggacggtgctttttgaaaagggaaaaagaagcgcccttgatttaaatgcttatcccgggctggacattgaaaacttttaaaaagggttgtgaaaaaccggtgtatgggaatcgcccatacaccggtttttttttggagatatgcaggggaattgtgcacaatctgtggaaaagttgttgataaatgattggacttgtgcaaaacttttaaatttttttccggacaggttgtgggtattgtggataaatatgttgataattgtggattttgtggaaaaacgttttaaaaagcaagaaatcaatataccgcctgtgtataaatctgtgcatggcacgcgatgccaaaaataaaaacctgtgcagaacatttccgcacaggtccaacattactccgccagttcggcccactcttccatcagcgcgtccagctccgttttccgctgctccagttcttctgtcagctcgcggattttaatatggtcctggaagatttccgggtcggccattttttcttccctgtcatgaatttctgtttccaacgtttcaattctagtttcaatttcttcaatcctccgctttttttgccgctcgcgtttttttgcttctttatcctgccgatagttgtttttcgccggctgttccgcttttaccttttcttgtttcgcgttttccaggcgcgcaatttccagcatttcttcttttttttgcacataataatcatagtcaccgagaaattcacgggtgccttccggcgagagctccaccacttttgtggcgatccggttaatgaaatagcggtcgtgggaaatgaacagaatggttcccgggtaatcaattagcgcattttccagcacttctttactgtccaaatcaagatggtttgtcggttcatctaaaatcagaaagttcgccttttccagcatcaatttggcgagggcaagccgggctttttcgccgccgcttaaggatgagacggtttttaaaacgtcatcgccggaaaaaagaaaattcccgagtgccgtgcggatttctttttctgttttcagcgggtatgcatcccataattcccggaggaccgttttattggaagataggtcggccagttcttgatcgtaatagccggtcataacgcctgagccgtattcgatcgtgccggatatcagcggaattctccgtataatcgacttcaaaagcgttgatttgccgatgccgttcgggccgacaagggcaacgctgtcttgttttttgactgaaagatggatgtttttggcaaccggctccccaccgtagccgatggcagcatcccggacatgaaggacttcgttcccgctttgtttggcaatttcaaacgaaaaccgggcggatttttcatcgccaagcggcttgtccatcaattccattttttccagctgtttccgccggctttgtgcccgctttgtcgtggtggcccgggcaatgtttttctggatgaatgcttgcaatttcgcaacttcttcctgctgcttttcatattgcttgacttcccgttcgtactgggcggccttttgttccaggtaccggctgtagttgccgtggtattttttgatggaatgccttgagatttcatagacctggttgacgactttatccagaaaataacggtcgtgggacacgatcagaatggcgccttcatagccttgtaaatactgctccagccaggtgagcgtttcgatatcgagatggtttgtcggttcatccaaaattaagatatccggctttgtgagcagcaacttcgccaatgcaaggcgtgttttttgcccgccgcttaacgtccggatcggggtgctgtagtcgtactggtcaaaacggaagccatgcagaacggaccggatatccgcttcgatctgatatccgcctccatctttaaagcgtgtctgcaaagtatcataagcgtgcagcactttttcatactccgcccggcggttataaatcgcggggtcggccattttttgttcatattcgcggagctgtttttccatatccagcaaatctttaaaaaccgacatcatttcgtcccaaatggacaaatctgattcgagcccggcattttgggcaagataaccgatttcgacaccattcggcacaatgatggaaccttcgtcataagaaagctggccggcaatgattttcagcagggtcgattttccggccccgtttctcccgaccaaagcgatccggtcttttgtttggatttctaattttatatccgataaaataagttcagcgccataatattttgtgacttgttgaacttgcagcaacatcatcgttatgttcacctctatatcattgtaagtgtacaggaaggcgaactgcaactcaaccggcgtgatcgaaatttgtcaaaaaacttttcacataaatccgtaaaaacccatgaaaaaaatgctcatttgtgatatatttaacatagttggagagagaaaaagacgcatgcaggcattttttaaaacatattttttctttgttcagataggagtaatattataatgaggaatggcagcgctgccattccggaatggacgcacgattggaaccagcagcacgaaaaatttaagctttcaacttggaggatttcacatgaaggatgaatcagtaaaaataccgcaagccaccgcaaaacggcttccattatattaccggtacctgagaaatttatatacactcggcaagcaaagggtatcatcggcggaactgagtgaagcggtgaaagtcgactccgccacgatacgcagggatttttcctacttcggggcacttgggaaaaaaggttatggttataatgtaaaatatttattgtctttcttcggcaagacgctgaaccaggatgagatcacaaatgtagcgctgattggcgtggggaacctcggtacagcccttttgaattacaatttttcgaagaataacagcgcgcggattgttatggcatttgacaatgaccccgggaaggtggggagccatgttggcaatgtgcctgtttacagcatggacgaattaagagaacggctttgcgcggaagatgtaacggtcgtgattctaacggtccccgcttccagtgcgcaggcggtgacagacgagcttgccagtacgaatgtaaaaggcgttttaaactttacgcctgcccggctgaacgtgccgccggatatccgtgtccatcatattgacctggccgtggaactgcaggcactgatctactttttaaaacattattcaaatgatgaagaaaatttgaaagaaacaaaagagccggttgcgaagccatagccaaaaagctttttttccgttatcataatgggtacagggggtggcccgtttgaaaacggaatgcaggcgcaaatggcaatggccgggtttggctctggcgtgcaaagggaaaagggcggattccacgtcggcacttaaaggagaacggcgatgaatgcgaaaaaaatgccggttaccggacatatccaggaattgagaaagcggttaatcaccgttctcattttctttctgttcgccctggttgttggcttttttaccgcaaagcctgttatacgttatttgcagcacgccgaaaatgccggcatgttcacgatgaatgccttcagggtaaccgatcccattaaggtttttatggaagtttcggttgtgatcgcatgcctgttgaccctgccggtgattttgtaccagctttgggcgtttataagcccggggctgtatgagaaagaaaagaaactgacattaagttacattcctgtttccatcctgctttttatagccggcgtttctttttcctatttcgtgctttgtccgctgatggtgaagtttatgatgggcttgtcaaatgaaatgggcattcgtgcggtgatcgggatcagggaatatattcagtttctgctggaaatcacgcttccgtttggctttgtgttccaaatgccggtcgtggtcctgtttctgacccagcttggcatcattacgccgaggctgttgaaaaaggcaagaaaatgtgcgtatcttgctctgattgcagcagccggcatcattaccccgccggacgtgttttcgcagctgattacctttgtcccgctcgttttgctgtatgaagcgagcacgctgatttcgaaaatggcgtaccgcaatgcccaaaaagcggcaaaagaaatgccaatggatgaacagacgattccttctgaataagaaagccgttttccggacggaaccggaaaaacggcttttattttttcactgagtttttcagcttgaaatggagaaagatcagcctgattccggaacccagatccaatgttgcaatcaacagcagtaaataagaaaaaaagccccagccgcccacttgtacctgctgaatggcaaaataagtgaacaaggccccgagcaggcagtttacaattcctgaaaaaagtggtctcatcatagaagtcctccaattgagctgtaaatttcatgtacggatgtctgcagaacggacgggtgcaaaagcagcctcacgaccacaattgtgttcatggaaacatgcgcaaacatggaaacggtgatccggtttgttttctcatataaataagcgagcgtcagccctaaaagggaatataaaaacaagtggctcggttcggtatgcgcgagcccaaaaataaccgagctgacaataccggacaaaagaaaagaaaatcgcctgcgcagcgtgccgaaaatgattttccgaaagacgatttcctcgagaatcggcccggcgatcgagctgatgaggatgacaagcggaaatctttcaatcagcgccatgatttgctgcgtattgttggaggcagccggggcaccgaacaatgattcaatgatagcggctgcagtctgggcaaagaaacaaagaaagacgccgcttattgcccatatggcggatggcgcggccggaagcggttcggcccggtctgtttctttctttgcggcttttcttaaaagatacaggacgatgatcagcccgatgataaagctgatgacggtccaaagcgggggcgtcaatgtccgcatgctgtctgccggttcgtggaaaacgttcaccccggcatagtagagcaacggatacccgatggcgccggacagcagcataaggatgtacgtcacgagaatatacacatactcttttttcacgcgctcttttcctttcttgccagttcaaagtttaaaggatcgcaaattcgtccaatatgttcattgtactattgaaccgggcggggttcaaatgccgtgcgccgggccagtcttttcagttgcatatccggatggtgatcgggcatacttataaaggggcaagcgaaaggggcaagcggctgaaacggaggcgcgcaaccggcatcctttgacagggctctttaaagagtgcaggacccgaaaaaaataaaaaaagttggatgagaagacttgcaaaaaagcaaggaattatttattataataaatgtgttagcactcaacttatgtgagtgctaatattgaccaaaattttacataatacgaattaaggaggttgtttcacgtgttaaaaccactgggtgatcgcgttgtcattgaattagttgaatcggaagaaaaaacagcaagcggtattgtcctgcctgacacggcaaaagaaaagccgcaggaaggcaaagtagtggctgtcggttccgggcgtacccttgataacggtgaacgtgttgccatcgatgtagcagcaggcgaccgtatcatcttctcgaaatatgccggcactgaagtgaaatatgacggaaaagaatacttaatccttcgtgaaagcgatattctggcggttgtggaataagcctggcttgttgaaacatagaaataacgatatgacatgaggaggttttataaatggcaaaagaaattaaattcggcgaagaagcccgccgcggtatgcttcgtggtgtggataaactggcaaatgctgtaaaagtgacattgggcccgaaaggacgcaacgtcgttctggaaaagaaattcggttctccgctgattacaaatgacggtgtcacgatcgcaaaagaaattgaactcgaagacgcgtttgaaaacatgggcgccaaacttgtctccgaagtggccagcaaaacgaacgatgtagctggtgacggtacaaccactgcgaccgttctggcccaggcaatgatccgtgaaggcctgaaaaacgtaacagcaggcgcaaacccggttggcatccgcaaagggattgaaaaagcggttgcggctgctgttgaagaattaaaagccatttcgaaaccaatcgaaggcaaagcttccatcgcccaagttgctgcaatttcctctgctgacgaagaagttggcgaattgatcgctgaagcaatggaacgcgtgggcaacgacggcgtcattaccattgaagaatcaaaaggcttctcaacggaattggacgttgtggaagggatgcagtttgaccgtggctatgcatcgccttacatggtaacggattccgacaaaatggaagctgttctggataacccttatatcttaattacagacaagaagatttccaatatccaggaaatcctccctgttctcgaacaagttgtccaacaaggcaaaccgctgttgctgattgcggaagatgttgaaggggaagctcttgcaacactcgttgtcaacaaactgcgtggcacattcaatgcagttgcggtgaaagcgcctggcttcggtgaccgccgcaaagcgatgctcgaagatattgcaaccctgacaggcggcgaagtgattacagaagaactcggtcttgatttgaaatctgcaacaattgaccagctcggccgtgccggaaaagtggttgttacaaaagaaacaacgacaatcgtggaaggggcaggcgactctgctgcaatttctgcacgtgtaaaccaaatccgcatgcaattggaagaaacaacttccgaatttgaccgcgaaaaattacaagaacgccttgcaaaactggctggcggcgtagcagtcatcaaagtcggtgctgcgacagaaaccgaattgaaagaacgcaaactgcgtattgaagatgctttgaactctacgcgtgctgctgttgaggaaggcattgtagcaggcggtggcacggcgcttatcaatgtcatcaagaaagtcgcttccattgaggcagaaggcgacgttaaaacaggcatcaatatcgttgcacgcgctttggaagaacctgtacgccaaatcgcggaaaatgccggccttgaaggttcggttattgtggaacgcctgaaaaaagaaaaagtcggcattggttacaatgcagccaatggcgaatgggtcaacatgattgaagcgggtatcgtggacccgacgaaagtaacccgttccgctcttcaaaatgctgcatctgttgctgcaatgctgcttacaacagaagcggttgttgccgacaaacctgaaccgccggcacctgcaggcggcgcacctgacatgggcggtatgggcggcatgatgtaataagcgcctgaaaatgctggtataacaacctttacagacgttcaatccttgtaccatgtccatgtttcggttcatgttttagaccatctgttttcaaagaggctcccgtgaagtgaccgggcgcctctttttttataccctttttgcgaatgtttgcatgcggataggatgttggcctatcaagagccgaaaagaaagcggcataagatgtaagcgtggtgatcgcggaatgaagggagtgtataaaccgtgagtaaagtgattgcgaaatggaggcatacccgtaagccgtgatgatgggggggagaggcaagcggcaaacgtgagcgtggcggccgcggaatgaagggtctgggcgggtttacaggaaaacgaaggcttaggcatgccggcccggttattccgcgtgttcacggaatacccagagccttgtgccaagaaaattgacggccatccctgccagtgtggcgatgatcttcgcatataaaagcggccagccccactgctggtgaaagaggaaaagcagaagggaagtcagcgcatagacgattaaattgacggcaataaaccgtgaagcctcgccccatgttgctttttttcttacttgaaacgtccagaaccggttcagcaaataactgtttgccatgccggctgtataagagcaggcctgtgcaacaagataaggcacatggaatgatgtgagcagaaaaaatacgagaaaatcaacaagcgtatttccggcgccgacaatgcaaaacttaagaaaagcggcatattgtttgagcatgggtccagcaaacctttcgtaagttgtgttttcaagttttcattgtatcactgttttggcttaaggcgaaagaagatttcccgtctttatataaattcgtttcaatagtatagcgcgggcgccttttgacttctttaaaaattttgccgatgtattccccgatcagccctaccgccatcaactccaggccgccaaggagccagatcgagatgatcagggaagcccagccggagacggtatggccggcaagttcctctataagggcataaaggccgacaaaagcacttaaaataaacgtgataaacccgagggccgtcacaaaacggaccggggttatgctgaaagacgtaatgccatccagggcaaaagcgagcattttctttaacggatattttgattccccggccatccgctctttccggtcgtaatacacttttgcggaaggaaacccgagcaaagggataatcccgcgcaaaaacagattcgcttctttatattttaaaagttcctccaatgccctcttgctcatcagccggaaatcagcatggttcggcaccagctgaatccccatttttcccatcagccagtagaacccttccgcacttgtccgtttgaaccaagtgtccgtttcccggctgtcgcggacgccgtatacaatatcatagccttgccagtatttttccataaatgcccggatcgcccggatatcatcctgcaaatcggcatcaatggagatgacgcagtcggaatgctcactggcgaccgttagccctgcaagcagcgcattctggtgcccggcattgcgcgacagtttgatgccttttacaaacggatggcgggccgaagcggattcaatgatctgccaggttttgtcgcggctcccgtcatcgacaaacaagagcgtgctgtcttttgcaatcagtttggactggatcagggattcgagcaccccggaaagctgcttcatcgtttcatgcaatacggcttcttcattataacaaggaacaacaatcgttaatttcggatattgactcattctacagcatctcctttaccagcatgatgcttattttgcttcgtataaataaatggtccacgccgagtcggcatttcggaaagtttttaaaaaccgcaaatgctcttcttctgcgttttggatcgggacagccgagaaaatataccgcccgccaagcgctttaaatgcttttgtgtcgatgtcaagatgatggattttgatgccactgtttttccggaactcataatgcttgcccagttcgctgacaaaaatataacagcggtttccccattggtcaaaatacgtttttaattgtgggcttttatccagttccccggcaatgattttccggaatttccttttataagacaacggataataattattgtatgaatctaaggtgtagaaaccgttgtactgggcaatggccggatagatcccgatgctggcaacacggtaagcgcttttcggttttccgatgtagcggccgattgcgtgaaactggcccgtcgcgtaaaactggttgaacgaaggtttcccggcaaaacggtaataaatttcagggttaaacgcaaacaggacaaccacctgggctatgaggcaaatttttacgaatgccttccactttctgccgcgtttccaaagaaaccatgcccccgccgcaaacatcgtataaatgataagcggccgcaaaaaatgaaaccgtgcaaagttaaacgtattcagcaggctgatcttttcttttaacggttcccatgccttgttgaaccagaaagcataccagagcgataaaacggcattcagaataaaaagctgcacataccgtttttcctttctccatgcttttgttttataaatcagccacatggcgataaaagagaacggcagaatgacaaatgtgtgcacggtcatatcatgtgtatgcccgaacacataattttttaacgcaagccggagcgtgtgccaaaagccgagttttgagctgacaaaatcattccggcttgtcggctcatgggaaaagacaagggaatacacaagccggtattcaatccctaaatacagcaccagcatccagccgattgcaaaaaagaacttccagttgcgctcccgtttcacaaacatatcccgtatccacaaaagccccatcgccgccagaaaaaagaagaacccgagcacaaagctggaataaaaaggcaaaagggtcagcgccagccactctttccatgtggcctgccggttccggatatttaaaaaagcccaaagcgcaagcggcatccccaatgtgcttaacatgccggacggccaaaacggggttatcgcaaaggcgagagaaacccataccctgataaagtacccgtcctgcccttgaacaaaatgccgttttagcaacaggtacattcctaaaaaagcgaagacccttgtaatcgtctggctgaatgtataagccacaaccgaagggaacagggcgtaaagccactggattccgctgaattctgtcccgaacgcatttcgcggcagcccgttcataatttgtggaatcgtcgcattcagagggccgaacagctccccgctgcggtcgagcacccggtaccaggcgatattcgaatccaggttgtcgtggactcggatatgcatattgccgccaagtataaacattggcgcaagatagacggccagcatccatacggccagccataaagcctttctttctttactgatcttcattccggtctgacaccatcccgtttctatttttggatgtattgttccttctctccataaacacgtttaaatagacgcgggcaaccagggaaaagttcacataaaaaatacaggcaaaaatgatgcggggtttaaatcatcggcccgttattaatgatataataaaaccagcataaaatggcattcgatgccaggatgaagggaagaagctgccatgatcataaaagatgtgcaagtgcattaccggaacattccgctgctcgttccgtttaaaacagcattgcggcaagccaatgaaattgacagcattgaagtggaaatcacactggacaatggcataaagggcacaggggcagctgcgccaaccgttgtcattacaggcgattcaaccgaaagcatcatgtctgttgcggcagggcctgtcaaagaggcactgtccgggcatgacttgcgtgatttccagggcgccctgaaaaaagtgcagcggtgctgtacgggcaacacaagcgcaaaagctgctgccgacattgcactttacgatgcatacagcaaatggttgaacattccgctgtatgcctatcttggcgggcagaaaaatctccggacttccatgacaatcggggtggatacgcccgaaaaaatggcgtgggatgcggaaaaaagcgtggaagccgggtttcatctgttgaaaatcaaggtcggcacatatccggaaatcgatctcgaacggattgaagcggtccggcgtgctgttccgcctgatgtcaaactgcgccttgatgccaatcaggcgtgggaaccgaagcaagcggtgcaaattttacaagagttggaaaaaagggatttcggaattgagtttgtcgaacagccggtacgtgccgatgactgggaagggttaaagtttgtaacggaaagaacaaagctgccggtcatggcagatgaaagcctgttttcggcaaaagacgcgctgaaattgatcgcgggccgatttgccgacctgattaatattaaactgatgaaatgcgtcgggatttctgaagcgtggaaaatcgcggacattgcagaagcaaacggcgtgaaatgcatggtcggcagcatgatggagccttctctttctgtggcggcagctgcccactttgcggccgcccatccgaatgtggcctatatggatctggacgcgccgctttggttgtccgaagaaccggatcatttaacctatgacggcgaggatgtcctgctctctgaccagcccggcatcggcatcgtccagcctgtgtaatggttgtccataaacttccggcatgaaacattttgccggaagccatctttcgtgtacaataaggataatttaaaatgaacggaggatgcgatgcaatgggtgcccgaaaagcgttaatcaatattgattatacaaatgactttgtagctgacggcggccggttgacatgcggcaaaccggggcagcagattgaagaaaacattgtggcgcttacgaagtcatttcttgaaaacggcgattatgtagccttcgcgatcgactgccatgagcaagacgatccttatcatccggaaacgaaattgttccctccccataatctcaatggcacgcccggtcgcgagctgtacgggaaactgcagccgctttttacagcgtggaaaggaaagaaaaatgtgcatgtcatcgataaaacccgttacagcgctttttgcgggacggatctggagctcaggctgcgggagcgggggatagaagaaatccatttatgcggggtgtgcactgacatttgcgtcctgcatacggcagtggatgcttacaataaagggttcaagctggtggtccacgaaaacgcggtggcaagttttaatccggacgggcacaaatgggcattaagccattttaaaggttcgctcggagcggaagtgcggtaaacccattaggtaggagtgattcgaaagcatgcgttataaagatgacagtttagcgcttcacacagatttataccaaatcaatatggcgcaggcctattggaaagacggcatccacaaccggaaggcggtgttcgaagcatttttcagaaaaataccgttcgggaacggctacgccatctttgcggggcttgagcgaattgtggattatttgaaccactttcacttcactgaagaagatatcgcctatttgcgcagcaccggccattacagcgaggattttttgcggtacttgtcggaaatgcgcttcaccggaacattgcgctccgtccgcgaaggggagctcgtttttggcaacgaaccgctgatccaggtagaaacgtctctggctgaagcgcaaatcatcgaaaccgccattttaaatatcatcaattaccagacgctgattgcgacaaaggctgcgagaatccggtcggtggccggcgatgatgctgccttgttcgaattcggttcaaggcgcgcccatgaattggatgcttccgtgtggggaacgcgggcggcttacattggcggatttgacggaacaagtaatgtccgggccgggaaagtgttcggcatgccgacgagcggcacgcacgcccatgcgatggtgcaggcataccgggatgactacaccgcttttaaaaaatacgcggaaacgtataagaactgcatttttcttgtcgatacatatgatacactgggttcgggcgtaccgaacgccatcaaagtggcaaaagaatttggcgataaaatcaattttctcggtatccgcctggacagcggcgacatggcttttttatcgaaaaaggcgcgggaaatgctcgacgaagcggggtttacggatgcgaagatttttgcatccagtgatttggatgaatatacgattttccatttaaaagcccagggcgcgaagattgatgcatggggcgtcgggacgaaactgattaccgcatttgaccagccggcgctcggtgcggtatataaaatggtatccatcgaagacgggaacggggaaatgcaggatacgattaaaatttcaagcaatgccgaaaaagtgacaacaccggggctgaaaaaagtattccgcattttaaacaaacggacaaacaagctggagggcgactatattgccatgcaggacgaaaatccggcagcggaaaagcggctgaagatgtttcatcctgtccatacctttatcagcaaatatgtcacaaactttgaagccatccatattcatgaaaccatctttgacaaggggcggctcgtatatgaacttccgccgctggatgcgatcaaacaatatgcgagagataatttggacctgttgtgggacgaatataaacgcattctaaatccagaagaatacccggtcgatttgagccagaaatgctgggacaacaaaatgcgcaatatagaaaaagtgcggcaaaaagtgatgcggtttgaagaagattaaatgatgatggcggttttttccatctgtttcgtagcaataagacagtagatgcggataaggaggataaaaaatggacgcaatgcaaaaaagaattgtggaagaaatgaaagtaaaaccggtcattgacccgaaagaagaaatccgtaaaagtgttgattttttgaaaagctatttaaaaaaatacccgttcctgaaaggattcgtgcttggtttatcgggcggccaggattccactttgacagggaagctcgcgcagatcgccatcaatgaaatgaaagaagaaaccggcaaccaggaatataaatttattgcggtacggctgccatacggcgaacagaaagatgcggacgatgttgaattggccgtccagtttattcagccggacaaggacattaccgttaatattaaaccggctgtcgatgcaagtgaagcttccctggcaaaagcgggcatcgtcctttccgactatgcaaaaggaaatgaaaaagcgcgtgaaagaatgaaagtccagtacagcattgctgcgatggaaaattgcgttgtgcttgggacggaccattctgcggaaaatgtaaccggatttttcacgaaatacggtgacggcggttcagatcttgtgccgattttcaggctgaataagcgccaggggaaaatgctgttaaaagaactcggctgtccggaacggctctatttaaaaacgccgacagctgatctcgaagacgaccgcccgcagcttgccgatgaagtggcattaggggtaacctatgatgacattgatgattacctggaaggcaaagaagtttccccgaaagcaaaagccaccatcgagtcctggtatgtaaaagggcagcacaaacgccatatgccgattacgatttttgatgatttttggaaatcatgataaagccggcctcccaaagcggttccaagtgcaggaacccggcaaaatttttggccgcgagtgaaagcagccggcttccaggcgaaggaagcaaaatttctgtgaaaagtgaatatagagggcttccagatgaaggaagcgggaaaattccgccgggaagggagcacagggacccagctgaggagtctcacctatttaaaaaaatcaggccggaatcctgcttgaaagatcaggttccgttttttggataaaagtacatgggggaaattcaatggcaaaagcattcgatgtgaaagatatagaaaaaattgtggttttggattttggcagccagtataaccagctgattacgcgccgaatccgtgagtttggcgtgttcagcgagctgcacccgcacactttgacagctgaagaaatcaaggcaatgaacccgaaaggcattattttctccggtggcccgaacagcgtctatgatgaaaatgccttccatgttgacgaagaaattttcaaccttggcgtgccgattttgggcatctgctacggcatgcagctcataacaaaagccttcagtggcaaagtggaaccggcaaaccagcgtgaatatgggaaagcaacgattcatgttaaaaccgccagccggctgtttgacgggcttccagatgatcaagttgtctggatgagccacggggatctggtgacagaagtgccggaaggatttacggttgatgccagcagccccgcctgcccgatttcggcaatgagcaatgtggataagcagctatatgccgtccagttccatcctgaagtacgccactctgtgtacggcaatgaacttttgcgcaattttgcttttaaaatttgcggctgcagcggaacttggtcaatggaaaactacatcgagatggaaattgaaaaaatccggcaaacggtagggaacaagaaagtgctgtgcgccttaagcggcggggttgactcttccgttgtcgcggtattgatccataaagcgatcggcgaccagctcacgtgtatttttgtggaccacggtcttttgcgtaaaggcgaagcagagagtgtgatgaaaactttctcagaaggctttaatatgaacgtcattaaagtcgacgcgaaagaacggttcctgaaaaaattgaaaggtgtttctgacccggaacaaaagcggaaaatcatcggaaatgaatttatttatgtctttgatgatgaagcggcaaaactcgaagggattgattttcttgcccagggaacgttgtataccgatgtcatcgaaagcgggacaacgactgcccagacaatcaagtcgcaccacaatgtcggcggtctgccggaagacatgcagtttacgttaattgaaccgctgaatacattatttaaagacgaagtgcgcgcagtcggcactgaactcggcattccggacgaaattgtctggcgccagccgttcccgggcccgggtctcggcatccgcgtgctgggcgagattacggaagaaaaactcgagatggtgcgcgaatctgactatattttgcgtgaagaaatcaaaaaggccggtctggatcgcgacatttggcaatactttacggtgctgccgaatatccgcagcgtcggcgttatgggtgatgcccgcacatacgattatacgatcggcatccgcgccgtcacgtccatcgacggcatgacttccgactgggcgcgcatcccgtgggaagtacttgaaaaaatttcaactcgcatcgtgaacgaagtcccgcacgtcaaccgcgtcgtgtatgatattacaagcaaaccgcccgctacgattgagtgggagtaggaacaggaaaacggcgatcctaggaatattaagggatcgctgtttttttctatgtcagctcaattaaatagcgaaagcattcttttaacttgatttcaccaccagttatttcactatactttttcagttggggttttcaatatatttctcaaaaattaattcaaaatggtctgctgccccaaacccggaaataggaggggcaaatatttgaaccaccccccaaccttccgatgcattttcctctataatttgtctgtagtcgacttccggttgtcctttccaccgattgatttttatcttaacaaatttataacggtacattattcttcctaaaatttgtaaaaaatgatttattttgtttttcgaagcaaatatacttgtactccagcataaatggcacaaccaatcataagaattggaaattctattccagtgcttttggttttaaaccaatccacaagggaccatatgagtaaaaccaaagtatagtagctaaatgctagtcttgctgcttttccggaatgatccttttccatttcatccatttttctcattttcatctttccttttaatagttttatttatcgaatcaaaaataaacaattcatctatccttacttctaaaatttgtgagatgagtaccgctaaacgaagagaagggtcatatttgctattctcaatagcatttatggtttgtcgtgtgacattacatttttttgccaactcttcctgcgacatctgcttctttttcctgtattttttaatgttattttgcatataatcaccaattagtgtaaaaaattttttacatctgtgctggcattattgtatccccttacaaacaaaatgtcaaatattttttacacaataatttctaaagcatcttaatttacattttattaaatattatttatttttcggatatgaaaatataatatagagattgctagggggattggtggccatacagtaataaaaatgaagggagggatacagatgcaattattgttgaaaggtcaacttcttaaatcataaagttcaaaggcagttatggttttagttgccgctacagctgttactttagccattctaatttttaaaagatggatgtaattgaaattctgcatcgtgcagagatgattgcaccgagatgggttgtaaacgtaattaatgctactggttctgtattagccattgttactctgctgagaggatggtctgcccattgcagttcttgaacaattaatagatttgaggtgaaaaaatgcttgatattcaaaaatggaagggaaatccctggttagtgttgacgattctttcgtttggtttttttatgactcaattggatttacaaattgttaacattgcgattccgaatttaatggaaacattacatgcatccattaatgaggcgctatgggttctaaatatatacatattggtgcttgccgtttttttaattacggccggccgttttggcgatctatttggtatacgacaattgttttcaattggaattgtcctttttaccatctctagtttgttatgcggactttccacaagccctttggaactcattgtatttagggctatagaaggacttggtgcagctctgcttttaccgcagacaatgacatttattatacgattatttccttccgagcgtcgtggaacggcccttggaatatggggaatggtaggtggagttgctgctgttgcaggtccgagtttaggcggattcatagtcagtgtgttaggctggcgctggattttttatataaatgttccaattggagtattgatttttatattcacttatctatttgtcccggaaatccgaaattcagcaaaacaacagcttgacttgatggggggttctcttggtttctttatcgtgtttatttttaacctatggattaattgaaggccaacactttaaatggtccatgtacattgtcggcattcttattatttccgtagttatctttatgaggtaattgcgatgttaacatcgcaaaaagctctttatcatattctatgttcaacaaaaattgcgtcagaagcgggatccgttaattccatttgctttgtttgaagatcgtaattacacgttaatgaatgtggtaggagtctttttttctattggcgtccttgggttaatgctgcttctctcgatatattttcagtccattttgggatatgatgcatttagggcgggacttacgttagttcctgcatcacttatttccatgtgtgtatctccatttgccggaaaattttcaaataaaataggtgggaaataccttgtgcttgcaggattagcgctgaccctgatcgggatgatatgggttatttttatcatgaatggccataactattgggtgcaatttatgttgtcgatggtgattactgggtttggaaacgggttattaatttcaccgacggcagcagttgccgtgaaagaagtgaaggatgaagttgcaggtgcagcatccggggtgatgaatactgtccgccaattgggaacagttggaggcagtgcggctgttggggctttattacaaaatagaatttctgccatgaatcatggttcggaatttgaattggtctttgatatttcaacaaaatttggcggccatttaagtggttatttaacagcattgcgtgaaagtttattattgccgatggctgctattgctttggcttgtatagcatgcgcttttgtacgaaaaaatgcaaagcgactttcaaccaacgaagtaaaataaattttctttatatttaattatgctatgtataggtgaacctcccagtgtgagatgttaatcctaaaactattttaacccactgagggtgcggttcacctgtttttgtttctttggggggccaaagttggggcgtccatacaaaacggaagaaaaaccttagaacgtgttgcaggacaggatacctctgaacgtagcgccgctgaaggaagatttttgcgaaggtaagcacaggtgcgggttaagccttattcgaacatgctttcaggagaccagtgaaacagtagtagcccttcagtttctcaaaatgaatctggagggaaacctcaggtatatttttgaaaaatttgcactttactattttatattttaaaactgggcttgtatctgattcgttcagcaagctccaattatttattttttgatccggtcttaaaaaaaacaacatagattaataacaatagaaagaacaaagcttgaatgatttttgttacaatatgtatttcaggattgaaatttaaatcaaaaaggatattggcaataacatatactcctgttatgattatcaatgattttaagaaccactccatagaatacccactcctatatccttattctctcaaagtaataaggttaccaatgctcttgcagctgttccagctaaccaactaggtacacccatattttttaattgagttgttagtgcattcgttattgtgccctcaaagtctaccacaatattaagggtcttcattacaaattcgtaacttaaatattttttcagggtacttttcgagccttttgaaataggcagtttattaacataattccttacagttctatcccatgagattctaccaatttttttgagtttttttatcatggactttgccgctactttagctgctttcgatttcacgccaaatgttgtaacaacatggttttcagtgtcttctccagataaacttgattgaatcccatttacaatgtctgtctcagcaattccatgagcttgcaattcattttgtaactttaataagttttgagtttcagtatttgttaaatgaacattttcttgctgattagatacttctgctgcttttatatgagttgtaaaaggaacagacacactaaacaaaatagaactcgcaactgtgacatgaataatttgctttttcattatatcccctatctatttagttttattgcttcataacacagtttattatatcctgaatccgtgacaaaaacctaatttgtggcattaataggtagattccattgtgcagccttccgataagtgactgattatttgttaaacagtagttttcttgttttcaatttttgaagaagctgttcaggagattttccaggcacgacaaataagcttgccatctccattttttttgcaagttttacggcaatgtataggtgctagttcatgcctgattagaaaaaggcatagtaaaggcgtccaaaagctggaagccatttgttggttgaactgatttttagcttccactgtcgtccttggtgaacaagttttgaagccagggtaatcatgttctgtatgacagttcggattcttcttcttttcactttctttttaagaggtgtatcctattctttcaagctttcctggccgatcatacgaagtaaattgtacgcaaaaataccaaaatggagaatgagctcgttggtttcatattttccggatggcaggcgttccaaatccagctctgatttaatttcactatggaactgttcgcatgtaccatggtcgtgatagagtgaaactaccacatgagccgggacatctaaggtcgtccaataggtttcaaattcatattccggtatcaaaaaaatctgaccgtctctcgagatcgatctttcgatcactttaaacactttccggatggtacgctcttcgccattcatttcaatagttgcggggatggatccaaggtagactttctttccttcccgttcttcgcagcacatgccatatttttgagcgatttcaagccagtcctctgctttttctttacggggattgcgtttgataataaagtctgtttcgttttccaggaaaatgatgaggttatcccggctgtcgtttccggaatcaagcctgaaaagcaaaggtttgtctgtcagttttttggcaaacggaagggtgtctctaataaaatccggtgtccctttttggcaatgcacgtttccttttcgcatttcaacattaaggcagtaaccttcctgcccgatataggcgaacataggggcatagccgtcacagcctttataggttctttcgacaccttccttttttgttttggaattgtcaaatggtgaaacatccatgtcaaccggaatataagctttttctttggcgtaaatggggctaattttagcattggttcggcggatcaaatccagcgattcttcaagtagaacctctttccactttttcgtcaaagctgcctgatcaaggcgctgccttaaagttgggctggaagggaccccttttatatccaaagcaaattgaaaaaaggcatcatcgcggaaggtttcaatattgtcaaaatcacttttgccctggcaaagcaggccgatataagatttggcaacatcaccatttgagtattcaggattacgggaaatgcttggcaatttataggcatttaactttgaatctaaatttgtctgatttagtaggtttcctacaatagctaatcctgcttgggcagtaattcgttcattcgtagcttctataataaactttttcatgaaatcacctgattgtggaattggttaaaatggaactctgtccatattatactagatcccatgcagatttttcgagattgaatgaaaatttcatcacggattcaggtatatcacaggtttacgggtatttccttaagtattgcatttaatgttgcaatttaggcacctaaaaagttttatgaatacacaaaaatctgcttgacgtttacaaggaagcatttataatgataaatggatgcataaatgataatgattttcattatcattagaagcaaaaaaggaggtgtttttttgaaagggacgagcaacggtgtaatcgggaaaatttattatcctgttatctttctccttatctgtatgattgcgttttccgccatttattcggtttcaattggaacggtccacataccaattgaaaaatcaatgaatgttttgctgcacgtcctgacaaatggcaaaatggggcacattaaagggatggaaaactcctcctattttaatatcatttatcaaatcagaatgcccagagttatttttgctttattgattgggatgggcctttctttgtgcgggattgtgatgcaagcagttgtgcaaaacccgctcgctgatccatatattatcgggatttcttcaggaggaacgcttggtgcgaccattgtcattttgatcgggtttgtaagcaatgacttgtttggcacatttagcattgcatttggcgcttttatgggtgcgatggcaacatccgtagcagtattgcttttgtcaagtgttggcggaaaagcaacatctgtaaaactggtattgtcaggcgtcgttgtcggagcattgtgcagttctttttccagccttgtgatttactttgccaacaatgcagaagggattaaagacgttacgttctggacaatgggaagccttgcatcggcgagctgggaaaaggtgccggttttgtctgttgtggtcctgatcggctctttgatttttctttttcagcaccgtgtgttaaatacgatgctactcggtgatgagtctgccgtcacattgggcattcatttaagtttattccgcaagctctacatggtggtcacagcattgataacgggtacgatggttgcttatgccggcacaatcggatttgttggtctgatcattccgcatatttgccggggtattttcggcgcagatcacaaacagctgcttccggcaacaatcctttcaggggggctctttttaatatgggcggacattttgtcccgaattctaatccaaaatgtagaattgcccatcggcatcattacatcagtgatcggctccccactctttatctatatgattgtgaaaaaaggctatcaatttggaggttgagggaagtggaattaacggcggaaaagctgcaagtaaaaagaggcaggaaagagatcatcaaaaacatgtccgtgtttgtcaaagataaacagtttgtcggtttagtaggcccgaatggatgcgggaagtcaactttgctcaaaagtatctataaaagtcttgtgccgcaaaatgggagcgtttttttagatgaccttaatgtactgaaaagctcggcaaaaaaagtttcaaggcatttaggcgtagtagggcagttcaatgaaatgaattttgatttaacagtcgagcaaatggtgctgttggggcggacaccgcacaagaagttactggaatcggaccagccggacgattacaaaattgttgaagaggcattaaggaaaacgcaattgcttgaatataaaacacgcagctatttgtcattatcaggcggggaaaagcaacgggtgattcttgcccgtgccatagcccaacagccggacttaatgattctcgatgaaccgaccaaccatttggatattcgccatcaaatcgaaattctttcctgtgtcaagcagtttggcattagtgtgctggcggctctccatgatttggatctggctgtcgcctattgcgattatttatatgtcgtgaaaggcggagaagtatatgcacatggaaaaccggaagaagtgctgacctcggaattaattgaggaattgtatgaaatcaaatgtcaaacttatgtgaatcctgtgaccaaccggcttggatttgcatacgaactttaaggaggatggacagacatgaaaaaaggaatctttgccggttgcctcatcgcactgcttgtccttgcgggttgcgggaacagggaaacgaccgggtcggaaaaaaatatgaaaagcaagtcgaattatccgctgacgattcataactatacaaaagcagagggcggcactacatataagaaaaaggatcaggtattcaaggaagccccgaaacgggtgatggttacgacaagaacggcggcggaactgctccttcatcttggcctgaaagataagattgtcggggtaggcgggaattttggcgccccggacaaatcggttgaaaaagactatgcttcattaaagatactcagtaattcgtatgtcggaaaagaagcggcgcttgggacaaacccggacttaattgtcagtcgcggcggcttattcgataatgccgactggggtgtcggaacggttgattctctgaatgatatggggattcatacctatattcttgaatcatccattccgggcgggacctatgactcaatatataaagatattgacaatctcggaaaaatttttaatgtccaggaaaaagcaaaactattttccaacaaattaaaggcgcgccagaagaagattacatcggaactgtcaggcattcaagaaacgaagacattcgcctatttacacatgtccgatccgaaagaaatcaacatctactctgcttataatgaaacttttttcaataatgcttttggtatgttaaaactcaaaaacatatttcaaaatgtgcgggggactgttagtgtagagcaattagtaaaagccaatcccgatgtattgattgtactgaattgggaaaacaatgccgataaggtcaaaaaggctctttatgaaaatcccaaattatcgagtatgaaagcaatcaaaaataagcaagtttacgcgatggattataatgagcttttcggctacagctacaacacactcgatggaatagaacaactggcaaaggaaatgtaccctgatcaatttaaatagttttttctccgtaacccaaagttgggaaacaagggaagaacattagcccatatgattacgatgcatgcattttgtaatttccagcatcctataggtaaaaccaaaaatgatggtggaaaggaaacgatataggatgggtgcaatcaagcataatggatataccttcgaaccggagttcagtgtggtcagccaaaccggtgccattcatgtttatcatggagaaaaatttattgaagaaatccgattcgaatttaatggtgactatccccagcatgatttaatagaagaattggtaaatcactatttgtatgaaaaacacctttagttcgttaaaatgaaacccaatttgcctgattccatacaggcaaattgggtttttcaggcatcacgctaatcttccaggatcagatgcacgttcaattcttgcatttttgtgatgatttctctttgcgtcaattgtccggggttaaattcaattttgatctctccgtcatttgtatcagacaatacgcgctcaatcccgtccatctttttcaattcatgttcgatcaactgaatttgggatggatcggttgcatttttggcgtaaacggtcatattttccataatattcctccttcaataaggtgccattatgattgattataccctttaaaagaattttttagctgcccattaagaaatataaccgtgctatatcccccacacggccatgtttgcccagctcccgcataccggcggatcggggccatccattctgccgttccgagcatagagcattaacgttattttttcgcctgaatacattaaggaaaatggataaagaggtgtaatcatggattcaaaatcttcttattatggatcagaaatcaagtgtgaagaagtctcgaacacatttccgccccagcaccagacgaggcatccgggatttgaatatttgatgattccccgtcctgtttatgacaatccccattatattggaacaggaaaactgaacaacaaggttgcgatcattagtgggggtgacagcggaattggcagggctgtggcagtggcttttgcaaaagaaggagcagatattgttattgcctattttgatgaacatgaagacgccagggaaacgaagcaggcaattgaacatttggggcagcgttgccttttgattccgggggatttgcgcaacaaaagccactgccggtatgtcattgcctgcacccttgaaacgttcgggaaaatcgatgtccttgtcaataacttagcggttcaatttgttcaaaaccggtttttggatattagcgacgaacagtggcatacgacgtttgatacaaattttcatccgtttttttacatgacaaaggctgcgcttccttatatggctgaagggagcagcattattaatacggcatcgattaatgcctatatcggccggaaagatttgattgattatacagctacgaaaggggcaatcgtcagctttacgcgcgcgcttgccaataacatcgttgaccaggggatcagggtgaatgctgttgccccgggcccaatctggacaccgctgattcctgcgagttttcctcctgatatggtcaaaacgtttggaaataacgtaccaatgaaacgcgcaggccagccttatgaactggcgcctgtctatgtgttgcttgcttcaagcgacggttcttatatcacaggccaaactattcatgtgaacggcggcggctttgtcgcttcatagccggggcttgcttttgtcaaaactgcggccaaatgggttaacgtccgttttgccgtgccgcagcatttttaaatgcagcaccagtgcccaaccttattcggcaggcccggatggggaaaaagatgttaatgcgataaggcaattcgttacaggatggtaatctgttttgggcggcgggctttttatattgctgtaacggcggttgcacggactcagcagctggtaccagccgcctctttgctggtcgacaaaataagtccagcaataggcaaacagatcacgatacaggtgcaagggattgcagccagatgcggccagcagggatgatgcgccgatcgcttcagccatgacccaatagtatttatcacaatcgattatacgcccgcttggagccatgctgaaaaaaatgcctccatttttccagtccaagcccaggccgagggcggactggaataaggattgcgccgctggtttccgccaattgccgggagcaagccgttccaacaacagcagcagcttgctccattcaatcgaatggccgaaaataaagccataaggccgaagctcacttttcgtaatgccgtaattgtacgtccaatcgattgtccaatcttcatgatagtgctcccaaatcagtcctcctgattggggaagtagacgaaacatgaccgactcggcaatgcgttctgctctttcaagatatcgcttgttgccggttgcttcatatgctgtcatcatcgcttcgcacagatgcatattggcattctgtccgcggtaaggggatacttctgaccagtcggccgagatttcatcaacatacagcccctcattttccctccaaaaatggcgttccaatacttcaaatgtatccgcaatcatgggaacagcagacgatatgcctgcttttgccgccatcgccgcggctaacaaaacaaaggcatggccatatgctcttttcactgaatgggatacagaccagcctttcaattcccaataatacccgccgtgtttgtggtcgcgctggcggtcctgcaagaacgaaataccgtgttccgccagttgccggtacgcttggccgggctccagcaacgccgccgcactgaaaataaacacaaaccttgcctggcctacaagttgtttcgtttcataatcgcatactgtgccgtcatccagaaagcagttgatatatccgccggacactttgtctatacagcgcggtgcataaaagttcacggtatccagaatatgctatttcagaaaacgggctgatgtaaaatccggccatgatcgctccatcttcgcatcactcctttaaaaggtactttatgatccgcttccggcaaatatgagagcagcaaacggggatttgctttcgcgtccaatgccggaacccgcaaaataggagctgtactttgagggggctttttgtaaacgccgcaaaagcaaacaggggctgggaaaatttgtgctgcctttttttggtgtgtaacacttgaaaatggggcggaatattactataattaatcccataaatttagtgagaattaaagggggagtttcatgcttttaacagggttaatttgcggggcattgctcggctttgtgatgcaaaggggcaggttttgcctgacgggcggcttccgtgatatgtatattgccaaagacaaccgcatgttttacgcgctgttaattgcgattgccgttcaaagcatcggggtttacgcacttattcagctcggcatgatcaaatatgctgcaggcacattcccgtgggttgctgctattatcggttcatatattttcgggatagggattgtcatggccggcggctgcgcaaccgggacatggtaccgtgccggcgaagggcttttgggcagctggatcgcgctctttggctacatggtcatgagcgcggttatgaaatccggcgtgctcgtgccggtaaccacttccctccagtccatccagcttccgaaaaatgcgattgcggatacactagggattaacatttggatcattatcgcagtcttttccctgattgtactgaccattttaatcagggaaatgcggaagccgaaagtggcggttccggcgatgaaggcaaaacgcaaagggcttgcgcatcttttgtttgaaaaacgctggcacccgttttttacagcagtacttatcggacttattgcgattttagcgtggcctttaagcgaagcaaccggaagaatggatggcctcgggattacaacgccgactgccaatcttctgcagttccttgtaacgggtaaccaaacgtttgtaaactggggcgtttttctcgtgctcggcatttttctcggttcttttatcgccgcaaaagcgagccgcgaatttcgttttagaatgccggacgcaaaaacgggtatccgcagtttccttggcggtattttgatgggattcggcgccagtgtcgcaggtggctgttcgatcggcaacggcctcgtgaaaacggcaatgatgacatggcagggctggtttgcactgctgtttatgatatttggcgcatggacggcttcctatttcatgtttgtccgcccgcaaaccaagcgccaaaaaactgcggcgaaaacggccgtcaccactgcataaggaggaatggaagatggaaaaagtattggaagtcatgggccaggtttgcccattcccgttaatcgaagcaaagaaagccattgaagaaattcagccgggagatgaccttgtcatccactttgactgcacacaagcaacggaaagcatcccgcgctgggcagctgaagcaggccacactgtcacaaactttgaacaacttgatgaagcagcatggacgatcacagtccggaaaaaataaatcttgatttttaacgcaggctgtcccacaaggcagcctgtttttcggtgcgccgtgcatggctgcttggcgctcgccgatgaaatttgagcaaggagaaatcttggctatcgatgctcgacaggcttgtagtgggtctcaagaaggctggtttataaaatctgcggcgttttccatgggtaacgtctattttcacggaaatcagcggagacctctgaaatatagtcgcgttttcacacccatctacgttttgggtcaaaagacgaaaaattttgaaatcatcatttttgtcgaattggtgttcccttcatttcaaaaatgttgtataataaaaacggaatagttttaatacttgaaaagggggaatgggatggataatcggacagggcgcaatgaatatgaccgtcattggaagcgggttattcattcgctgtttgaagattttgttgcgtttttttcaccaggcttgtatgagatgatcgattgggacaagccacctgacgacctggataaggaattccaaaggctgaatccggacggcaaaagccgagaccgggaagcagacgggctttttaaagtgtatttgaaagatggtagcgaacagtggatacttgtccatatcgaagtgcaggggtggaaagatactgattttgcagaaagaatgtttcaatacttctaccggatttttgatgcgtatgataaaaagatattcgcgcttgtgatttacaccgaagattactccgaaacgtataccccaccccgttatgaatacaactttttcgggacaaaattgagttatgaatacaatgtgtataaaatagcggaacaagatgaaaatgaattgttgcaatcgactaatccatttgcttttgtaatccttgcggcaaaaaaagccctgtatggaaaaacagctgcacagccaaccaaattagaattgaaaaagcagttgctccgggttttagctgttatgaaagatcgcttgcagctcgataaaaaggatttactgacacttttcattttcatggaccacatgataaaactcgaaagtcaataccaacaggagtttaaccaggaaatcaaaaattgggagggcggcacgatgataacgtatgaagatgaactaaaacaagaagcaagaaaagaaggaagagaagaagggagagaagaaggtaaacgagaaggaagacaagaagaaaaaattgaaattacccgaaaccttattaaacttgggataccactcgattttatcaaaaaagcaacaggcctttccgaaaaaaaggtccttgaaataaaggagaagctggaaaaggaataagggctgatggctttgaaatgggagggcggcacgatgataacgtatgaggatgaactaaagcaagaagcaagaaaagaaggaagagaagaagggagacaagaagaaaaaattgaaattacccgaaaccttattaaactagggtcatccctcgattttatcaaaaaagcaacaggcctttccgaaaaaaagatccttgaaataaaggagaagttggaaaaggaataagggctgatggctttgaaatgggagggtggcacgatgataacgtatgaggatgaactaaagcaagaagcaagaaaagaaggaagagaagaagggagacaagaagaaaaaattgaaattacccgaaaccttattaaacttgggatacccctcgattttatcaaaaaagcaactggcttttctgaaaaaaagatccttgaaataaaggaggagctggaaaaagaataaggcgaatggtattgaaacgggagggcggcacgatgaaacgtatgcggatgaactaagataagaagggagaaaagaagaattgcaaaagctagcggaattggaaataccgatactgatccaacaactaaagatcaaacgttcttcaactgatcaagctttaacagatgacacctttacattaggatgacacgacttcagaccaaacagttactaacgaaaccaacactgacaatgttcgttcagaagttgctccaactgctgttagcgtagtccaacatgattcatatggaaatcctatttcgccaacgtcaacattagcaacaacaattaattttcttaataaaggttacacaacaaatgtacgtattgcaacgggagcgactttggaagtggagcaaagaatccattgttaacaacgtcttttactccaccgttataatcagaggccgtctttttgccaatgttgatcacgagacggcctctgacttttcaagttctggttggtcataaaaccaatatgcggatactgctgccttcctccgcaaaataatatttgttcaaaagccgtatgcttaataggacacataaggtttgagggtaacctccattttaatgctcctttgtaaaatgaactaaacattgctactttgttgccggctgcaaaaaatcatcatgcaaatggatgaacttgtcaatgtaaaaacttcagttcattttatattctttatttaaatagcgagatgattagctctttcccaatgaagatagcaactagccaaattataagtgcagacaatttgttcaaccgaatcatccatttaccggttgtgtctaccctacctaacacgctacctgctacagctaaactaaaaaaccatatccaggacacacctatacaggctattgtaaaaacaagtttatctaaaccagtatagcttattgaattagaaccgatcaccccaattgtgtccaatatggcatgaggatttaataaggaaacagaaattgcaaaagtcatttgtttttttgctgacatcttactttctacttgttcgtcctttgaaggagcagatttccaaatcgaccatcccatgtaaattaaaaataaaaacccaatcccataaacaatggtttgaagccatgaaaatgataaaacaataactgaaacacctagaatggccaaagtaattaagattgtgtcacaaactgctgctgtgattactactggtagagcttttataagatttgattgcaaagcaccttggttaaagacaaaaacattttgtggacctaaaggtaaaatgagaccaaaggctaaaacaaatccatgtaaaaatgcttctaacatcttctccctcctttcaaaaagaaaattcaaagggtaactccttatgattgattaacctatgactattttagaggagaatcccccatatgtatccatccaaatttgatggatattaaaccaaccaaattttataatgaaaatataaaatggatgggagaaaaagacatgcaacatttagagtggaaaccgaataggtcgtcttcagtcgctttatataagcagattgaaaagtacataaaagataagattataaacggagaatggactgtcggtacaaaaataccttcacagagggtactagccgagacatttggggtgaatcgtagtaccgtcgtaacagcattggatgaattaactgcccttggtttaatcgaaggaaaaaccgggggtgggacaaaagtgataaataatacatggaatctgttagtatccaaccatcctcccgactggaactcgtatgtgaaggcagggagttatcaacccaatttacctgcaattcaagatattaatgaagcagaattcaggccaaatatcattcgtttaggaaccggagaactttcaccggaactattaccgtataaaaaaatgcaagatgtattccagagacttcctaatagaatggcctcattaggatacgaagagccaaaaggcgacttgtttttaagacagcaactaacggaacacttaaaaaagatagggattaatgcctctcccgcatcgatattaattgtctcaggagcgcttcaagcattacaactgatttccattggtctattaaatagggggtcaaatattttacttgaaaaaccctcttacctgtattctgttcaagtatttcaatctgctggtatgagattatatggagtgccaatggatgagactggtcttcaaacgtcattaatcaaaaagtataaaaaacaatataatgcttccttgttatacacgatcccctccttccataatccagcaggggtactgttgacggaagaaaaacgaaagcaactgatggcgatatgtgaacaggagagtcttcctattatcgaggatgatgtttatcgtgatttatggatcgattctccacccccaaatcctttaaagaaagaggataagaatggaatggttttgtacctaggaagtatgtcaaaaacaataagtccagggttaagaattgggtggattgtggggccggaagctgtaatcgaacgacttgcagatataaaaatgcaaacagattatggttcaagttcattatctcaatgggcagctgccgaatggttttctagtggcttatatgatgaacatatgtgttatattagggaacagttaaaaattcgtcgtaacgcaacggttcggtcactcgagaaacactttaccgatatcgctacgtggaattttccaaaggggggattctatgtctgggtccatctcactccatctttatcgattcgcgaactttttgaaaaagcattaaaagaagggatattacttaatccgggaaatctgtatgatcgcgatgcaatacagtacttgcgaatttcctatgcttatgcacctttatccgacattgaagacgccattgcccgactagccattatagtcaaacaaatagcaaaagaaacaaaacaatagtaagaaagacggaaagttctcgctttcacgagctgccgatagtggtaaccgttccttgtaacgggcgaccaaacgtttgaagaactggggcgttttctcgtgcttggcatttttctcgattcttttatcgccgcaaaagcaagccgcgaatttcgttttagaatgccggacgcaaagacaggtatccgcagtttccttggcgggatctttgatggaattcggcgccagtgtcgcaggtggctgttcgatcggcaacggcctcgtcaaaacggaaatgatgacatggcagggctggttggcactgctgtttatgatatttggcgcatggacggcttcctatttcatgtttatccgtccgcaaataaagcgccaaaaaaccgcggtgaaaaggccgtccccatagcgtagggaggaatgcaagatggaaaaagtattgggagtcatgggccaactttgcccgttcccgttaattgaagcaaagaaagccattgaagaaatgcagtcgggggatgaccttgtcagccactttgactgcacgcaagcaacggtaagcatcccgcgagctgaagcaggctaaactgtcacaaactttgaacaacttgatgaagcagcatagcgattacagtccggaaaaataaaatttttaaacaatttattgtaattgctttcatctccattctttatcttttataatcattagtagaggaatttttgggctgctcgggaatattgctgtttgagcctctcaggtttatggttggctgatgaccattgtaaaaaccaccagacaaggacttttagagccaatataaatagaggttgatgaataagcgagattctcagaattggcaaggattcttaagattttgcagaactttaacgcaagagttttaaagaaaatacagaaaaaaatgcgattgaaagctatttcgatggttagaagaggacagaatccccccttttgcaaatatctcttctattggtggtaaacattaaaaccggcttgctgggaggatcggataaattgccaaaatccgattcgttcaggttgccctaaatagggaataaataaaaagtataataaacgatgaaacggaggtctgtattatgtatacaaacaaaattataaacgaagaaatattcaattttatttcaaaaaaagggcgttcctgtttctatgaaaaaggacagatcatcaatatggatacggaaaagcaatcttttatatatgctctgatagatggctatatgtttgttaaacagttatcatgtcaggggaaggaactaatcataaaaatcatgaaccctggccatttctttttgctagatatatccgactatgaaagtatcaattaccaatactttgcattagcaaaaacagattgccgtttggtaaaactagttaaagaaactttcagtaaggcgataggcgataacaagatgttaaaagaaaaatgggaggaatacatttacaatcaggtaaacaaaaagaatcttataataagagactttactttatttgggaaaaagggaacactgtattcaacattaattcgtttagtaaatacatgtagtgttccaaaagaacatggatataaaattttattaaaactttctcatgaagaactaagccagatttgtggaacaacacgtgaatttatttcaagaaatatgaaccagttaaaaaaagacggaattatttcatatgatagtgtggatcattgtattatcgtcaaaaatataacctttttaaggaattacatacactgcgaatcttgtcctttacattattgtgaactttcatagagaatggtaaaatattcactttttcactatttaaattgagcaaacggcatagtattgaatccttaactcaagctatttgcaattacttttttgacttttcgagacactaactgtgattgttttgcgaaagtaggatattgcttacggactcaatttttgaaggtgcgtggcttccgctgcttgccttcaaatggcgttgctccacagctcatggatatatccacggttttcatttcaacaagtcaagaacagtaggataatgattctgacagagctttagagcctctgccaaaatnnnnnnnnnnnnnnnnnnnnnnnnnnnnnnnnnnnnnnnnnnnnnnnnnnnnnnnnnnnnnnnnnnnnnnnnnnnnnnnnnnnnnnnnnnnnnnnnnnnnttattttgccatacacaccaatctgtttattcgactgatcaagcttttttgataaatctttgttttgttgatttaaataagtcagttgttcctcgagaagtcaaattattttctcgttattgggagaggcattaaccataaaagtcaccaattttcgcatataagttaacgttagtataccatagcgaatgacaaagcgggataaaaatatgcaaatttagaatacaccttttggtgttggttaattgaatcagcgttgctatataaaatgaataaaatatcacggctctgttgcttgctgtacaaagtaacccttatgcaaatggcgcccgggcttgatgtaaaaaacttaagttcattttatatagtccatcaatacctttccgcatatctgttttccagaagtttatatgaatgtttttcatgcttgtgttgtcctatctcatagatttttcaaatccttcatgaccgtttgaatggtgtgcttatctacgtcgttgaagatggaaatctctgcgattgccgttttgatcgtgcaagcaggcttcgaggacagcacgggcggggttattccaggagtattttcattttcagtttgtaatgttacggggacaatggttagtttttgttttggcaaagaaaagcacctcctttaattgatacgttcatagtaccaggaggtgcagcctcaaattaatttagacaatatcccaatttattgtggctaatctccatcctattagttaaaaagtaattttgcgttgatggttgaacaatatattagccgagttcctataggttattagattcctaatttaatccatctttttttagaaagacttaggataataatatttataataacaatagaggctaaatatatcacaatagaccagatatccttggtatcaagtgtcatactatccctttgaagcaccttatctattcgtgcgtacatcgtgttacctgcttcaaagggagcgataaatccaaaaattttcgtacttatggctactaaaataacggacgttatccaataaacaatacttatgccaatactaatcaatatatttgggcttaatatactaaacgttccaataatgacgatatattgaaaaacaacagctgaaaataaaaatagcaacaaagtaaaatgtgaaaagttgtgatatattattgatatcaaaaataagccgagcaatataaacacaaaacattctatgaacaaaaccgccacttttttataaaagaaggtaaaaatattttcccctattaacttataaaataaaatatttttattagtatactccctgttgataaagaaagctataacgaatgaaaacaacataaaaccaaactctgtagcaactgtataggagctaaagaagaatatatgatatgtaactttgctaaccctgtctattccaatcggtagaaaatacccgagtaaaaaaacaaacagaaacatagatcccagtataattaaaaccttgttattaatactttttttaaactccagtttcatcgttgccctcccacaatatacttactcatttatatatacttcgatcaacttatctatagaatcatatttttgaattgattgattattgaataagtaataatctcctgtaatggctttcaaatctgataagttatgtgtaatatttataataattttttccggattttcgtgaatgtattcattcagaaaacgatgtatttccattactgtttttttgtctaaggcatttgttatttcatctaaaacgataatttttttatcttctaacaaaaagctaagtaattttagtttttgcttttgaccatcgctaagatttttaattagaacttttccgtcaatattttcaaggttcagtaagacagcaattttacttatcagtttggaatcaaatttattatttaaaaagtttattaaaaagtccttggaaacatcattaggtatattagatgaactggatattagagaaatgttctgactaatatcttttccaatccgtccactattgtttaatagaaagtccttggcaagttgagattttccaactccgttttttcctaagatgtgactgattcttccatttgagaaatgtaggttcgtgttcttaagtaacgtcttaccttttactcttaaagtgtagtttgaaatgttcatacacgagctccttttaaacaaataactttttaaacaaaatgggatgattatttcttcttttcattattaatgattgcttttataaacacaataaatttttttgtttatctctttatcactagtttgcaaaatacaatatccaatgtacaatggtgtttgctgcaatgcataccccaataatttgaatagtaagtacaagccaatggttttttttaatactattatattcgtctaaatcaagaaaggctagaacaattttgtaaccatcagaattcaatacggggactaaattccacaataaagtgcttgagaaaaacatatatgcttttgttaaaggttcaaaagaaaaagtaagttgattcacggtctcaacaatattaacaaaaagataattgataaacaaaccgcttgcatgaacaataatcttttcattcctagaaagcatgtaagtctcattcatttgaacataaaatgcagggaaaacgtaaaaattcagtttaaatccaaatttatcaaactttttcccaaagaatttcaaagacaagatatgtcccagttcatgaaaaaatatatttactatgaaataaccgcctataactatccacattttccaaccataaattagaggggataattcatgttgcaatttcattaaatgagtataattaaatacaaataatatagctataacgcataaaaaggcgtaaaataattttgttggtactttttctttataagtcttcaagcgtgttaattgcttctcagtaagagagtctagcctgtttttataatattccccactttttttgtcttttataaaaacatgtttttgcacgaaaatttcatagtcttcatcttcaaattttagcggtttcatgatctttatttccatagtttgcgtagtagtaatcttccataaaattatgaaaataatttattttgtcttcggaattaaataatgaaacacacaaactgcaaatagaagaaaactcatagggaataccaaattcctctatttttttattctcttttaaaatatttaaaaaccatttaaatccttcttttcttataataaacaggagtaggttagactgcaatttttctacagttctttcataagtttgactatattcctctcttaaagttatttttgtttcgaaaatagcaggggaacagcatggatatatctctccatcatggtgataaacaatttcgtagccagggcattgcagagaatcttcatcatcaagattataaaatttatgtatattttcctggctaattctatttttagcagcaccaaccgggatcaatggaaattttgtaatcttaattcctaagattgagtcacccaattcctccaaaatacgatttgacatcttatctttggtgactgccatatttagagaaacgtcaatatctggatatttcctactgtgttcaaatattctcttgacactggataattttacaaaaggagcatggtactcatcataacttatagttaatgctaccacatttaaagagttcatgtctttaaaatattcctcaactttattttggctacctccccaaaacccgttagaaatcaatgttatttgttttttgtaaggctttattatttccattaattcttttaaaaatttataatctaaaaagatttccccgcctgtgaatgaaattacctctattgttttgcttcttgcaaattcatttactaaattccttatatagtctttttccatttttacttcagaagttggtgagctagaaaagcagcaatgatcacaagatgcattacattttgaatctaaattaattgctactgtcttattatacattaaatattcatcccctttaatagtcaaaaattactgaccatgttaagcttagaaaaactaatcattgttttcctaaattagtctttgcacgaacaaaaaacagccgttgtaaaaatatcaaatttgttgataagcccccgtgccatagactccaaatatcgtaaaaaagcctcattcctatttagaaggaaacagctgcataaaaatatgattatacagaattgttttttagctttatgacgaatcccatcaattgagtttaatcgttcttcaatatggattgttacaagtgtgtatacttttagtatcgaaaatataaataactgtctttgctttaacaaaacaaagatagtcggtatataaaattcccgctatataatttgaactaaacattactactcatgatgtgtagccagaagcaatgtcatctgtcctgactataactgattttgacgcgaataacttaagttcgctttatatagcagagtaaagcttcaaaataagatactattcgtcttactatgttactagtgctttcatgttttgagaatgacttttttgttatataatttgaactaaattttgccattgcctatgtattgccagaagtcaatatctatccgggtcatgattaattttggcgcgaaaaacttatctaaattttatattgtcatctcttctttttgtgacaaagattcataagatacactggagaatttagcttaaagcgatctcggatccaatcggacgatttcctccttattctttgatttagacagtgaagtgtaggaatcaaaattaaaaacaagtatggctcagggctttgatttctgcaaagccctggccctttctaaactcatgatttaagaaagaaattttttgctagttaagtataagagacaaagtctactatatgtgacttttatcaatgtccacttccaactatccaacggttcccctttgatttcacaaagtaccaaagatcgttaactttggccaacttttgagattcttctaccaagctcttaaattccaaatttttcacattactattttgtgtattttccttactcattatctatcacctccttctcttatactataaatattatctcattatattcattatttctgtgactatagtcacagaaataatatatttttctaaaccttatactaaagcaaaaattttcacagagaacttttttctccaatagagaaatagctgcttaattgtttggactttaacagatggtgttttcttttttagcaatgtcttttaccacgtcttccaatgtcacttgctccaaaactttctccattgcaatctgggatgcttcaaatatcggttcaatggtgttctgaatatttcttcccacagggcatttcgggttcgagttacggtgaatgctgaataacgctttatcctggacgacattcacggccttataaacatcaaggagtgtaatatcggacagcgcttttgccagctttgcccctgcttttcccggatggacttctattaagccggattttttcaacatccccatgattttccggatgacaacaggatttgtattcacactctccgctaaaaactcggaagaactcacgccatctttattcatttcaatcaatgccaatatatggattccaacagcaaaacgactgctgatcgacatttccagtcaccatcctcatgtaattcatataattacaagtatagtataactcctaaaggaaataaatatcattgacatgcctgccatcttgtaattataataattacatgtaataaagttgattacatatcacaggaggaatgccatatgaaaattggaattattggcgctagcggggaagccggcagccttattctcaaagaagcggttgacaggggccacgaagtgacggcaattgtacggaatgcagcgaaaattcaagacaaacgggttgatgtggtggaaaaaaatattttcgatatcaaatccggagatcttcaaaaatatgatgtggtcgtcaatgcatttggtgctgctccaggaaaggaacaccagcatgtggaagccggccgggttttaattgaagctttaaaaggggcgcccggcacacgcctcgtcgttgtgggaggcgccggcagcctgtttgcggatgaatcagaaaccgttcgggtcatggacacacccgattttcccgctgcattcctgccaactgcgaaaagccaggcacaaaatttagaagacctgcagcattccaccggtatccaatggacttttgtaagcccggccgcgttctttgatccggcaggcaaacgaaccggatcctacaaaaaaggcggggatgtgctgacgttaaactcaaaaggggaaagctacatcagctatgcagattttgcggttgcaatcctggatgaaattgaaaatccgcaccataaaaatgaacgattttctgttgtcggcgaagcagaataacaacttgttgtataaagaggctatcacatttgcgtgattctgaccttctacagccaatatgttagaagaaaatcaagtgaaggcactgaaaaagtgatcgtttatttttatttgcaaaaaaacggtgagacacgatgtctcgccgtttttttgtttttgtgggcttttcgcttatgaaaattttagttttcctgagcggatgtcatcggccatcgttgcataaggcgcttctgaaatcactttttcgttgttgatgccttcattcttaatataggtgatatccgcaaattccggaacaacatatttcgggtaagtttcgtatttttcgcgtgattcttccattaaatcaatatggtcattttgatagcagaccgtgatttccgggtgttcatgtacccatttcgggaaaaagatcactccgtgcatccgtttgtcatccggcatgaagttcagggaaacgtctgtgcctgtcggttctgtccaggaaactttaaaaacgccatccgtgatcttcacgatatctgctttttggccgcggacccagcggccgccaaccattccgctgtggatgcgataatcaacggtattttgattttttacataaaattcatattcccagccattttcatacgtatagatcatatgggtgcctaaaaattcttctaatgttttcattataaaccttctgtatttaataaatcattcaatattaaacatgtcaatatttacatgttttattttatacctatgctataataatgtcaataaatcgtgacggaggttagccgatggcaaaaagagtccttaaacacgcgattctgggattgttgagaaaacaagatatgagcggttatgatattacggccgagtttacaaaggaaatttcccaattttggagtgccaaacacagccagatttataccgaattaaaaaaactgctggatgaaaaactgatcgaacaatatattgaaatatcgggcgtcaaactggaaagaaagatgtacaagctgacagaagaaggaaaaaaggaactggcacagtggctgatgcacccggaacaaattcccgagacggagaaagatacatttgctttaaaagtttattttatccaatacattcccgaagaaaaaattcttccgcttttccaggaccaattggatcagcgggagcaaaaattatcggagctgaaatcccgttaccagcttatttttgcgcaaagagaagagaaaatgggacttgcagcagatgagttagggcattatcttgtcctgacaaaagcgatctcccgggaagaaagctatgtagactggctgaaaaaaagcatccggtttatcaggcaaaaaaggtgaacgttccttagccataagacaaaccgcagtgaaggcggtatccaaattcagctggctatattttcaggataggatcattgaatcgttgccccggcttgcgtaaaaaggcattttggttttcaaataatgccctgatttcgtgaaaaatcttttccgatttcagggtcttttcgtttgggcttgccgggtcagctccggaaagagaatatgccgttgacagtactggaggtgaaaaggtggaatttagcagttctttgcccatttatatacagatcatgaatttaattaagacaaaggtggtttccggtgaaatcgatagaggggaaaaactgccatcggtcagggaattatcaaaggaattgagggtcaatccgaatacgatccaaagagtttatcaggaactggagcgggaagagctggtgaaaacgcaaagaggaatgggaacttttgtaacagaggacagccttatcatcagccagttaaaacaaagcatggctgccgcggtcatagatcgttttttcagagaaatggaaaatttgggtttccagcccgatgaaatcaaaaaaatgatatcggaaaggtttatggaagggaatgaataaaatgaagaatattgtagaaatgaacgggctgacaaagcattattttcgtaaaaaagccctcgatcagttgaatttaacgatagaggaaggaaaagtcgttggaatattaggcccgaatgggagcggaaaaacaacgctgattaaaattttaaccggccttttacggcaaacaggcggagaagtacggattgacggacacaaagtgggcgtggcaacaaaatccattgtttcttatttgcctgaccgtaattttctgtataaatggatgcggatcaaggatgctttaaaattatatcaggatttttatgaggatttcgatgaaaagaagttcgaagcattacttgattttatgaaattggaaaaagacatgaaaattgatacgttgtcaaaaggcatgcatgaaaaactgaacctctcgcttgtcctggcaagaaatgcaaaattatatattctagatgagccaatcgccggcgtcgacccggttgcaagagaccaaatattggatgcgattatcggcaactttcgcgaaaacagttcgatgatcattacgacgcatttagtcagggatatggaaagcatgctggatgaagtggtctttttaaaaaatggccgaattgttttgacgggaaatgcagagcaattacgggaagaaaagggcaagcaaatcgacggaatctataaagaagtattcggggcataggagggaaaccggatgttgaaatatgtaaagtatgaaataagaggaacgtacaagtttattttgggcatattggctttggtgttcattcttttaaccagcatgtatgcctattctaataaggaaggctcgctgtttcattcagcgcaaatctttatgtcaattggtgtcatgctattatttggtgcggctctcattgcattcctctacatcgtcggctcgtttcgaaaagaattgtatgaagacagtggctaccttacctttacattgccgttgacaggaaatcaaattcttggatctaaacttattgctgctttaatctggtttataggactaggtatcgctgttgcgctaatcaatttcttgttgatgatgattttcagcccatttcatatctatcatttatcacaactttttttggtcaagtctttttttgtgtgtaaattcctctcagtcgggatagagtaattaacccgaataaatgtctgtcgctttgttggattggtcagacgatttcggttgtttggctttccattcaaaatagtcttccatcttcaaatagcggcgtccttctgcccatttttcatccttttccatgagaacagaacccattagccggattacggaatcccggttaggaaaaatacggataacctgttcccgacggcgaaattcttcattgagtcgttccatgccgtttgtcgttctcaggcgacgacgatacggctccggaagtgagagtgctgcagtgacatcgtcaaaggcttcctctaccatttcagtcactttaggcgctttatcctgataagtattcagaaaggactgaagtagtgtgtgtgctgtttcaatgtctggagcgtggagaatggctttcacttgttcagttccttcgctctctaaatgttttggaagccgatcgtgtacgttacgcagaaaatgagcttgacatctttgccacgttgctccctgaaacgctttttgaacagcgctgactaaaccgccatgatcatcgctaacgattacatctacgccctttagtccacgagattttatccaatcaaaataattcttccaagcctctgtgctttcactgtcatcgacttttaggccaagaatcgatcgatagcctttctcgttgacaccatagctaatcaatacaccccgggaacggacacggccattttcacgcacctttgtataaattgcatccacaaacagaaacggatagctgccctctaggggacggttattccagcccgtaaccacgggatccagctgcccacaaagattcgacacggtcgacttcgagaagtctgaaccacagagctcttcggtgatttgactgacacggcgcgtagaaacaccattaatcaccatttccatcaaagacaggaccagtgcttgttcactacgctgataacgctgaaagagatcagttgaaaaatgaccgttgcgcagcctgggaacgtacaaagagagctttcccacgcgggtttttagttggcgggggtaggagccgtttcggtaatcaattctagcttcattacgttcatatttttcggctttcagctgttcgctggcctgtgcctccagaacttgattcaaaatcgcctccaaaagggcatttatacccgattcttttgaatcgccaagaaataattgatgcaaaagttgttcatctagagtaatctgtaattgagccatccctgaatctctcctttagaaatttagttttttggttaactctattctaactgagatgatgggctctggctcattttctataaaaaaatgatagagacggcaagagaaatgaaatcccgctgtttttctggagggggctggccagccccctccagaaaaacagcccctatactccatattccctcatattcagataaccctttttacacaattatacggacttaactactttttttcatgatctcaaaagttctatctataaaagcctgtatttacatgatattctctatggcttgtagtgttgtcagtgtgctattgcttatctatttttcaatggcacttggcaaagtgacgttccgacataaaaagattggtggtttgtggttcgtcctgtttatcattttaagcagcatattcggctatattgacactgaaatcagccagtggataccgtattatttagatctgagcacctttcatgtggtaacacccgcttcctacgatgatcttcttcagatgcattatcatatcggcgggttgtacttgaatgcagtttcaaagtatgtcgccacaaatatcgcatcctctgtttatcacttggcgttaatgatcgctttatttttaggaacggggtatttgattgagaagaaaatagacttgtaatcgcgcagtaaaaagggatgagaaagccgtgtttagcgggagttgatcaattactgctgctaacatgtcaggcttccattaaaaaatccgatttgaaggaggggcggtgccgcgagcaggcatcaccctcctttttgactttgatgaaaaatcaacgcctgctttataaatagggcttgctgaacgaatccgattctgctctatggtaaggaaatgcgaaaaatgagcgacttcctttacatagggcgcgtctacgttagggaagcgtggaaaaacgaaggccttccttcacctagagcgcgtctatgttaaggaagcttggaaaaacgaaggcctttcttaacatagagcccgtctacgtcaaggaagcttggaaaaacgaaggccttccttcacctagagtgcgtctatgttaaggaagcgcggaaaaatgacggtctttcttcacctagaggccgtctatgttaaggaagcaagcaaaaacaaaggtcttccttcatatagagggcgtctacgagtcaagtccaggttattgtgtaaatttatgggcaaatgttttcaaccaccccctcattttttcggcttaacttccatggatttttttcttcatctccgggaagggatgtcaaatgcctttcaatttgacatcccttcccggagatgaaatcatccatgatggaagttaagctgaaaatgctgctaactattctttcccataagtgacttcctcttcgagtattctgtatcttgatactgcattaaaacggcaccaaccaaacgaaaagcagattgggtattaggaaaaatgcgaatgaccctttcccttctacgaacctcttggttaagccgctcgagnnnnnnnnnnnnnnnnnnnnnnnnnnnnnnnnnnnnnnnnnnnnnnnnnnnnnnnnnnnnnnnnnnnnnnnnnnnnnnnnnnnnnnnnnnnnnnnnnnnnctcctcttttcattgtttatcgtcgttgaaaacagtgttgccaagagttgataaaatgactccttctttttacacaattatacggacttaatccgtctacgttaaggaagcttgaaaaaaagacgaacttccttcacgtagagcccgcctacgttaaggaaacgcgcaaaacgacggcctttcttcacatagagcgcgtctatgttaaggaataatgaacaaaatattgccgttctgttgcctgccgcaaaagtagttctcatgcaaatggatgctcgggcttgatgtaaaaacttaagttcaatttatataacggtgggccgggtttgaagcgaagccacgaaggggaaaataatggaaagtaccctgaatgtggaggttgacgatgaatctattaaaaaaagcacacccggaaggttggctcattttgcttggtgcaattttgatgcttgtcgctacgattttgcatccgccacttgtcgacccttatgaccttcaaaaagcttatcacgcgttcaagcatgcacagttttggataggcgaccatatcctcatgctcattgcgatcagcttgtggctggccgggcttgctgcaagtaaaacatacatggcaaggaacaataaaactgctgattttggcgcagggatgatatttgtggcactagcggtctggatattgatccttgcttcggaattaaccattctcccgatcctcggaaacaaaggcacagatgtcaaagtgtgggaagcggttttttccttcgggttgttgtccggctatttcggttttgcctgcagctggatcggcattttctgctacggtatgacgatgaaacaggctggcggcacctttccgaaatggttttctgcctctgcccgatggtccggtctgctcgcctttttcggcatcatcatcacgtgtctgcattttgacttcggctatttcgtgattccggttacggtaggaccggtctttttatggacgatttggctggctgttttactgctgtcgggccgcatggattgagtgtcggttttttgcctgtactgcacgagatccattttgcgatcagaagcggaaaacagagggacttaaaactggagatttacaacatccgtctcgaaattcctcccccgcatgccatccatcttctattttaatgaaacttcttttctggtttttcgtatagatgatcagaaagggtggttgatgtggggttactcatcatgtttacggccatttttgcgatggttgccgcggtgctggtatttcctttttcagataaaaaattgaaacatgccggcgagccgcaaagtggagaaaaattgaagacatttttatctttatttctgttgctgtgggtactttctgctgtttttttctacgtgacgaaaagggatttaaatccatccgttttctggccggcactgttttttgcttctcttgccggtgcttttctcgccagtggaaaagaacagttcgcaaaggggctcgttttgctcgtttccttgggcatcgccgggtatatgctgacagcgccgctttggaatgccggggaaaaatatcacacagcgaaaatggcgcaaaaaacggaaattgagccgtttgatgagcgggaaacaccggcgagcgtgccgccgaagtttgcgcgcaataaaatgaagaagtcattcggccaggttccgaatgcaagttattaccagttgggaaatctgcaaatccagaaagtgaacggcaaatacgtttatattgcgccggtggaattttccggattttttaaatggctaaaaggcagggaaacacccggatattttgtgatgagcgcaacagatgcggatgacaatccaaaatttgtaaagcaaaatatgcgctatacgccttcttctttcttacagaagaacctgtcccgccacattcgcctccattatccgaaaaagattttttacggcgagccgcaagtggaagtggatgatcacggcaaatcgtattatatccggacttacggccattttatatcggcaaggaacggatttaaggcggaaggcattgtacttgtggatccggaatcaggggccatgaagtcctattctttaaaacaggcgcctgcttttattgacggtgctgtttctccggaagccgtcagcctgcaaaacagttatttcggcaaatttgtccacggttactggaacacgctgttcggcaagcgggatgtgaagctcccgacggatgaaggaacggaagcaaatgtcagcccgatttttaatgataaggggacgatgtattattttaccgattttacgagcccgaaaaaagatgtggactcgatgctcggctattcgctcacaaatgcgcggaccgggaaggccacatattatacaggcaatttgcaggaatcgtatatggattcgcaaggcaatttgcaaattgtcgagaaaaaatttatcgagaagaaatggaaaggctcgatgccgattttgtacaatttttacggcgaagccagctggctgacgcctgtgctcgattccaacggttttctgcagacgtattttatcgtttccgcggccaatccggaaatctcggtgaatgcttcgacacccgatgctgcgcttaagttgtataaaattgccctccggcacggcggcagcagtgttgacggctcatcgggttcggaaacgaaaaccgtttccggcaaggtgctccgtgtttataaagagaaaacgggcgattataccaatgtctccttcctgcttgctagcggacaaaactttaccgtcagctcggataccgtcccaatggccatttatttgaaagaaggagaccaggtgaaggtgacttacctcagtaccggcgaaacctttttaccggtgaaggcaatggagataaaggggattggaaagtaaaagcagaacaggggccgggaaacccctgttctttttaggcgtaaaatgagccgcgcggccgttcatggcccggatgcaggcccacacatgtaccaaatactggtttttgctgacatggtacggcagccggtttttgtgcgttttttgcacgagatcatggtaaagtgcaaataacgccgggccggatgcagggtgctttcgggctttccggtaataacgctgttgctcaagccggtctgttttttcatcataataatgtgtgccatccgcctgcatctttcctttattctccgacaaaatctttttgaaccgggcagtgccgtattcataccatgcctggttattcctgattttttccaaaatgatatcccggttgctgtccattaaaccatccccatttgcctttatatcaaagagcctgtttacagcaatccgacccatttccagtatgtcatgctgaacaataagactaatagataaccgataatagtcaacggcaggcctgatttcagaaaatcttttgccgtaaaagcgcctgtcccgtatgcaagcatggcttgcggcgagttgaccgggagcaggaaaccgatgctgatgacaaattgctggatcaggacaaatccgatccggttgtcacccagatggatcgtggaggtgagtgcaataaagatcggaatcagtgctgaagacaggctagtcgcactcgcaaagccgagatgaatcaggatagtgaacaaagctacaagggcaatcgtagcgatgagcggcatcgtttccagaccgagcgagccgaatattttgttagacagccactgtgccccgcgggtatccaacaaaaccgtaccgagcgaaatgccgacagcaaacacgatcacggttccccacggaatgagatgctcaactgttttccaatcaaaaaccccgatctttggtgccagtaaaatcccaatcgcaacaattgttacagtggtcgtatcaaaaggatgaagttttccttccgtcgtccagaaaagcaataaaagcagggaaatcacgattaaacggatctcagaagcttttaaatggccgagttcttttaattggttttcgattaaatcttttcctgcctcaagggcttttgtttccggcttgattaagtgggtcatcacgaaaaacaaaaggatggacatgatgattgcccacggagcggcatataaaaaccaggaactccatgtaatgtctgtttcaaattctttttgaataaacccgagtgcgaccatattttgggcggccgccgttttgatgccgatgttccaaatggaaactgcctgtacggaagtaatcaccagcaatgcgccgagtttgctgttgttcggcagcccgaatgcagccaccattccgagtaaaatcgggaccacggcaccggcacgggcagtggcgctcgggacaaaaaatgccaatacgatggaaacaaggatcgcgccaaagacgaggttgctcgttttcgtgccgacacgggacaagatccagagggcaagccgtttatgaagattggttacctgcatggcagcagccagaaataaggcagcggccacaagagcaacggcagagctgctgaatccgctgagagccatggccagggcattgcctgttcccgtcatttgtgcaggatcctggatacttggcgcaagcccgatcaagagtgcaattaacccgacaatcatggcggcgctgacctgataggaaacggcttccgtcacccataaaatcagggcgaaggcaaggatggcgagtgcacgttggccggctaccggcaggcctttcgtatgcgggagaagcgtaatcgcaatcagagcggcaaaagcagtagcgatccaaacccattgccatttcatcttcttcgtttgctggttggcagcattcattttgacccctcccttttgaattcttccaaatatttatcctactttaattgtatcaaagcgatacgggagaaaatgttaaagattggtgtatttttgcaagcggttccgtagatttcagcaggatgcataaaataggaaatttctaagcactcaggtggatataaaaggagacgaatatttatgggaccatttacagggagaagattaaaagaaacagggaagaaaaccagcccggcccggtttaaacattgtatgtgtaaaattttactcgcaggggcagatgagtggaaaaaataggaagacactctatcatctaaatgtacaccatgaaatgaacatctagagagaggtcttcccatggatattatatcaataattgctggattattaaaggatacaaagagtcttattgaatttgaagaacaggttaaaattctgatgcaaaaagtttttacacaatgggttggggacgtatttgagaagaatgaagaaaaaggggatgcattggagtaaagctggcgccgaagccatggtaaaggtgagcttaacgggacattgcaggaaacctatctgaaacaccgttcaagaagcgcgagaaagcaacggagcttgcaacaatccatcaggatgtctcaacgattcaagcagcctgtacgcccgtcaatcggcgtaaagcacggatcagtttccctgcattcaagccgttcatcggcaatggggcatttaagcaaaatattagagctttcgttttaagcctggtatgtgggggactgatcgttgaggcgcgcgaaatttacgagactcctgcgggaaaagcgagccaggagagaccccgcagcgaggtacgagcgaggaggctcgccggccgcccgcggaaagcgagtgaatttcgcgcgcctcaacatccccgttatccatctttatacggaaatattacatcttttccgaaaattacaccgagcaagtaaagcacggtagccgaaagtgtacaaaaagagtgtcttggaatacccgatatttaaaccttgtcgagaaaaacttgacacatacttactaaaggaggctcgccggccgcccgcggaaagcgagtgaatttcgcgtgcatcaacacccccgttatcaatctatacgaaagtgtacaaaaagagtgtcttggaatcccgatatttaaaccttatcgagaaaaacttgacacatacctcttcgtatgacgataaaatgatttttaacccttcgcgtataaaggaattgtcatcggcaatcacaattttaattttatccatccttttccctctggccccgccttttcttctttccattatagctgaattgcacccggcatacattctgttttttatctttccgctttgttctttctattttgcgggcgcattctttgcggcatgggcgtgtgggattgaatgattggaacagaaagaaaaaaaggttatgatagatagtatggtacggaatttttggaatttgcagcaaaggggtttgtgcagacatgaaatacatcgagcaagggacaagaaaattccgcctggcaaatcttgcgctatttgccgggggattcaatacgtttgcgattctctgggggatgcagccgcttctgccggatattgccaggcagtttcacctgtcgccgacaatgtcgagcctgagcctgtcttctaccaccgtaacgctttccgtgagcatgctgattgccggatcgttgtcggaagtgttcgggcgaaaatccgtgatgtctttttcactgattgcttcgtctgccctctgcatcctgaccgcttttgccccgacttatcatttgctgattgtctgccgggtgctgcagggccttgtgcttgccgggctgccggctgttgccatggcatacctgggggaagagattttgccgtcaagcctcggacttgcgatggggttatatatcagcgggaattcgatcgggggcatggcagggcggatcatctgcggaactttgaccgactttttcaattggcatgtggcgctggcgtcgatcggggtgatcagcctgctcgcaagcatcctgttctgggccgtgctgccgccgtcttcccactttactgcccggaagtttgaaatcgggaaactggcgggaagccttgtccgccagcttgcggaaccgggcctgatttatttgtttttgattggatttttattaatggggagctttgtttcgctgtataattacatcggattccagctaattgcgccgccgtattcgctgagccagacggtcgtcggcttcatttttatcgtctaccttgtcggtacattcagctcggcatggatggggatgcttgcggaccggcacggcaggcggaaaattttgcagctttcgctccttattgtgctcctgggggcctcgattacgcttgttccatctttatggctgaaaatttttggcattgccgtgttcacattcggcttttttgccggccattcgatcgcaagcggctgggttggccgcctttcctcccatgataaagcgcaggcttccggattgtacttattcttttattatatcggctcgagcatcggcgggacagtcgggggcgtgttctacagccggctcggatggaacggggttgtgctgatgatcgctgcgctgacggtgctggccattgtgttttcagtccggctggccgtgattgcaaagagaaaatggcttgtttctacacggaatgcttccaactaattttttgacaggaggggacatatgttacgccgctttttttcctattatttgccgcataaaaagctgtttattctggattttacgagcgcggtgattgtcgctgtttttgaactggcctttccgctttgtgtccagtggtttattgacaccctgctgccgagcggaaaatgggcaacgattacgagcgtcagcatcgcgctgcttttcctctatttgatcagcacatatttgcagtacatcgtcacctactgggggcatcagctcggcatcaatattgaaacggatatgcgcaaagaattgtttgtacacgtgcagcggcagtctttttcattttttgataatgtgaaaaccggccacgtcatgagcaggatcacaaacgatctttttgacatcggcgaacttgcccaccacggtccggaagatgcttttattgccgtcatgacgtttctcggcgcgttttgcattatgtttatggtcaatgccaaactggcttttgtcacccttattattgtgccgtttttggtctggatcatcacgtattgcaatatgaaaatgaacgaggcatggggcaaaatgtacggcgagattgccgaagtgaatgcgcgtgtcgaggacagtgtggcaggggtccgcgtcgtccagtcatttacgaatgaaaattatgaaatcacgcagttccagaaaaataacaaacggttccggaaagcgaaattgcttgcgtataaaacgatggcgctgaccaattccagcacgtatatgatgagccggctgatcgtccttgccgtccttgtatacggggcatggctggtatacagcggggaattgaaatacggcgagctggtcggctttgtgctgtatgtgaatgtgctgttcaagccgattgataaaatcagtgcgatcatggagctgtatccgaaagggatggccgggtttaaacggtttacggaattactggaccgcacgccggacgtccgggacagggaaaatgcggtcgaagttccggtgttaaacggcaacatcgcgttcaacaatgtcagcttcgcttatccgggcggccagcctgtgttaaaggggctgaatctcaaaattcgcgccggggagacggttgcatttgtcgggccttcgggtgcagggaaaacgaccatctgctccctgatcccgcgcttttacgatgtggacagcggcagcattgccattgacggcatggatatccgcaatatgacgaaaaaatcgctccgctcgcagattggcattgtccagcaggatgtctttctttttgccggcaccatccgcgaaaacattgcgtatggaaaattggatgctacagatgaagaaattgaagaagcagcccggcgcgcccatttggaagaggtcatccgtgcgcttcctggcgggtttgatacgcaaatcggcgaacgcggccttaagctttccggcgggcaaaagcagcggctggcgattgcgcgcatgtttttgaaaaacccgcccatcttaatcctggatgaggctacatctgcccttgatacggaaaccgaaaggcaaatccaggcggcattggatgaactggcaaaagaccggacaacgcttgtcattgcgcaccggctggcgaccattcgcaatgctgaccggattgttgttgtcaccagggacgggattgccgaacaagggcgccatgatgagctccttacccgcggggggatttttgcaaaactgcacgaggcccagtaccagcagtagatccggcccgcctttgggcacggggtttttaaaggaaaaaggaggtgtcctgcctgccggcatggttccttctgtgtgaaatggcggggtttttgaaaaaagaaaaaacgcaggcgatccgctgcgcaaaaatggggcttcttatcagacttttttcaagcggcggatatccgctttgacattcatgatatcttcgaataagacatccattttatcatccagcctgccataattgctgtcaaggctgcttatatcttttttcatgtctgcgatatcctgttttacttccgccatctcgcttttcagggaagcgacatcctgtttcagccctgcaacatcctgtttcagccctgcaacatcctgtttcagccctgcaacatcctgtttcagccctgcaacatcttcttttagccctgcaacatcttcttttagccctgcaacatcctgtttcagcccggcgatgtccgttttcatttctttcatctctgccttcattgaaaggacttcgccggacagttctttgatggccgtaagcagcatttcgtttgtgacttccgccatttttccgcctcctttgtcgaatatatgcttattctaagggatgatgccctgtcctgcaactggcgaaaagcaaaaaatagggcctgctattgcgtgaatcgggggcggataactgaaaaaccggttccctgccagcccgaaaattttattttcaacaaaaaagcggcccgcaaatgaacgaatgttaacccgaaacaagaagaaaatgttcgtgttttctattgacttcttttcattttcccgttacaatcaatcttgtcaatttactatgcaataccatcgtatatattcagggatatggcctgaacgtttctaccaagctgccgtaaatagcttgactacgaggtaatgagatagagtcagagggcaatcgtataaaaatagcaacctttgcccctcctcagtatgtgtcaagtttttcnnnnnnnnnnnnnnnnnnnnnnnnnnnnnnnnnnnnnnnnnnnnnnnnnnnnnnnnnnnnnnnnnnnnnnnnnnnnnnnnnnnnnnnnnnnnnnnnnnnngtaaaattttacacatacccctcctcattccttaagtctagcgtttcgggcgtttacgttcggaacgtttttctgttatggcgatttgggaaattccacaggagggataaggcaaaatgaagaactattttgagtttgaaaaactggggacaagctaccgccaggaatttatcgggggactgacaacctttttggcaatggcctatattttagccgtaaacccgctgacattatcgcttgccagcgtaaaggggcttccggattctatgcatatggaccagggggctgtatttgtggccaccgcaattgcttccgcgatcggttcgattgtgatggggcttttcgggaaatatccgctcgcgcttgctcccggcatgggactgaatgccttttttgcttatacggttgtcctgagctacaaaattccctggcagcacgcactcgccgctgtctttatttccggcgttttcttctttctgctcacactgacgggcattcgcgaaaaattgattaacgccattccggttcagttaaaacacgcgatcggcgcaggcatcggcctgttcattacgtttatcgggctgaaagatgccggtattattgtcggtgataatgcaacgtttgtcactttgggggatttgtcaaaaggccctgttctgctctccattttcgggattgttgtgactgttatcctgatgacaagagggataaaaggttccgttttttacggcattatccttacaagtattgttggcatgatttttggattgctgaaggtgccacatcaagtcgtcagtccggttccgagtttaagcccgacgttcggcgcgttgttcagttcattcggggattcatcattctggacagcgcaaatgattggcgccattttaacattcttctttgttgacttttttgataatgccggaacgcttgtggcggttgcaaaccaggcagggctcatgaaagacaacaaactgcctaatgcaggccgggcgcttttgtcagattccattgcgaccatcatcgggtctgtgctcgggacttcgacggtaacatcctttgttgaatcttcgtcaggggttgccgcaggggcaagaaccggatttgcttctcttgtcacggcctgtttctttattctatcaatctttttcttcccgcttttgtcggtcattacttcaaacgtcacagcaccggcgctgatcattgtcggtgtgctgatggtatcgaacttgcggcatattgaatgggataaattcgaaattgccgtcccggctttccttacattgattaccatgccgctcacttacagcatcgcaaccgggattgccattggtttcatcttttatccgattacgatgattgtaaaaggaagaatcaaagaaatccatccggtcatgtatttcttctttgtcgtcttcttattgtattttattttcttaaaatagtgccgaaaaaaacttgcagagcgcgctctgcaagttttttttcggcagcagaaattgaaaaaccggtgcatttcatttaaactaatcgtattgcactatagccgagggggattgaaatggaagcttttatcgtcaaaaaggttttaaacaataatgtacttgttgcctcccacccccgctatgaagaaacggtgttgatcggaaaggggattggttttaaccggaaaaaaggggaggccatcccgcaggcatcggctgaaaaaatgtttgtgctgaagaacgaaacagaacaggaacagtatatgaagctgattccttctattgataatcaaacccttgaagtggtcatttcggccattgagatgatccgcagccgggctgattctcctttaaatgaacatatccatgttgccttgacagaccatattgcttttgcgatcaaccggatccggaaagggctggctgtcaaaaatccgttcgttgccgaaacgaaaattctctatccgcgcgaatacgaaattgcccgcgaagtagtggattatatcaatgaagcaacggacgtctatttgccggaaggggaagccgggtttattgccctgcacatccacagtgctgttacggataagcagctttctgaattaagccggcattcccatctgatcgggcagctcatttccaccgttgagcatgaatttaaaatgacttttgacaaagacagcattcattatatgcgccttgtccgccatttgcgctataccattgaccgcgtgctgacgggggaaaaagtggaggagcccgagaaattgaatcatttcctgcaacaggaatacccgcggtgttataacctgtcgtggaaattgatcaaaatcatgcagcaagcattacagaaaccggtgtacgatgcagaagccgtttacctgacgatgcacctgcagcggatccaatccaaaatagaatcataaaaggcctcctgattatacatggcatgcgtgatgaaaggctaaataatgccaaaacgccgtcattgttcatgtcgggatgccaaatgcttttttaatttttttcttgcaactgggatgcctgcggtgctataatttgtcatggaaattgtgaatgatgcagcaaacaggaaaaaccggtgtacgatgcagcagcctttatccggtagcatgcgtctgaaacgggttccacattaaaaattaatcaaatgttatcataacgtgttactgattcgatcaggcatgagtgaaaaagatgccgggagtggcagccgccacggccttcccgctttttcctcatgcctttttattttcccggggaattgctgcacgtctgtttccggaaaccatcatgatttgaggaggattttgcatggcaaagaaagattacgcacagcttgctcgcgatattgtggaaaatgtcggagggcctgataatgtaaagtcgcttgtgcactgtgccacccgtttgcgcttccggttaaaagatacaggcaaggcaaacaaagaaacgctggaaagcttgccaaatgtccttacggcggtgaatgcaggcggacagtaccaggtcgtgatcggggatgaggtcgttccagtttataacgccattatggatgagtatcattttacggcttccgatgcgggggttgaaaacgatgcggcggcggaagaaagcgaagaaaaaggcaatgttttcgaccgctttgtggcagtgctttccggtattttcacaccgtttatctccgtcctggccggtgccggtgttttaaaaggcgttgccatccttttggcaaatacccatatcgtgtccgaatcatccgcctggtacagcatcttggacgcgctcgcaaccggcgtgtttacattgctgccgatttttattgcaattacggcggcggataagtttaatacaaaccggtttatctctgttgcacttgctgccgcgatgatttacccgctgacagacagcagcattccgaaaatcggccacattgccgggtacgccatcaattttaaacagtacggcggtgcggtaatcccgaccattttggctatttggatgatgagttatattgaaagatggtttaagaaacatttaccggctgttgcccagcttgtatttgtgccgtttttcacattgcttgttgccggcgccctcacttttatcgtgatcggcccattaggcaatgcgatcggcatgggccttgcttacggctatcaatacttgtacagcttgagccctgctgttgccggatttattctggccgggctgttccaggtgtttgtcgtcttcgggctgcactggggaattttgccgatctcactgattaacattcaaaactacggttatgatacgctgctggcgatgatgtttgttgccgtcttcggacagttcggtgcggtgacaggcgcgatttttaaagcaaaaaaatcgaaaaacagggaaatcgccgtttccgctgcaatcagtaacttctttggcattacggagccggcgatatacggcatcaatttgaaatacaaaaaaggttttattttcggtttggccggcagtgcgatcggcggcgccattgccggttttgccggtgtaaaagctttccagtacacgccgattatgaatttctttgaacttccgctgtttatcggcaaaggttcaagcgttgccatggaagtcgttgcgggtattgccgcatgggcgattgcattcgtacttgtattgattttcggttttaatgaagaaaacaatgaaaaaatgctcgcaaatgtccaaatgggcaagaaaagcctgacggaaaagaaaacgacagctgtggaaagcaagatggaatcgggacaaaaagaactgccgaaagtggatacggccggcatggaactgaacgaaattgtctataatccggtaaagggccgcgttgttccgttaacctctgtgaatgaccctgttttcagctcggaagcgatggggaaaggggttggcgttgtgccggaagaaggaaaagtggtagccccgtttgacgggcaagtatccgttgcttttccgaccggccacgcatacggcctgcaatccgaccgcggagcggaagtattgatccacgtcggcatcgataccgtcaacttaaacggggaacacttccattccaatgtaaaatccggggaccgcatcaggaagggtgacgtactcggcacctttgacccggaaaaaatcaaagaagccggctatgacacgacaacgatggtgatcgtaaccaacacgatggcatatgatgcagttgaacaagccgcagttgacgaaacatatgcggacgaagctttgctgaatctgtacaaaaaacaggaaacagctgtgaaaaactaattttgcgggcaaccctgaacaaaaaaccgccgggaaaatcattttccccggcggtttttccatttccattatgttttttctgaaacagcggttcttttaagaaaccggcggaaatccggctccttctccggcactccacggcttccgcctgagaaacgggctgcctggttctttcttttactgcgtgcggctgagccagtgttttccttcaacaagccgggaaacgagcatggcgcttaccgtgtttccggtcgaatttaaaagcgtggccggaacatcaataatcgtactaattactgcaataatcggaagcgactccggcgggaatccaaaaacgcttaaaatcagcatctccccgatcatgccgccgcttgggatcgcccccattaccgcgccgacaagaaatgcaacggcaatgacagccagcatatggggcaggcttgtcaaatctttcccgaacaaggtgaacaaaaaaacgattttcagcacgccgccaaacaccgagccgtccttatgcgtgttcgcgcctaaaggaatcaccgtttccgcgatgtcggaaggcacatgcattttttgaacagtttccaaattaaccggaatgcaggcagcacttgaacaggtagcaatagccgtaacagaaggggggaccgcatttttccaaaaaactttgatcccctctgcccccccggccataaaggcatataaggtaaaaaagccgaaaaagtaaatgaccgttaagatcaggtataaaccaaacgaacgcgcatatccttccaaaatttgcgggccgagtgtgccgatgatggaagcgaagtaacacccgagcccgattggagcataatacatgatgattttaacaaatttcatcatgacggctgttcccgatgccaaaaaagcagcaaccggctttcctttctccccggccaatgtggtagccaggccgaacagaacggaaaaaacaatcagctgaagcatattcgttttgctaaataaatttggaaaatcaggcactgtgaatgtttgaacaagctgttcgagaaaagacggattggtgccgctttgccggcttccgtctgcttttgccatcatctgttctatggcggttgtatctgtatgcgcaagcggcttgatgatgaaagtgccgccaaaaccaatgatggctgccaagagggaagtgccaaggaacacaagaatgatgctccctaaaattttgcccaaacggccaaggccggccatatttgcgatggcagaagaaatgctgaaaaacacaagcggaataataactgtaaacattaaatttaaaaataaatccccgaatggttttacaacctctgcttttgagcctgcaaccacgcccgcaatgccgccaatgatgatggcagccagcaatatggcagtggatttgtaattgcgaaaaaatgttttcaaattcaacctctccttaaacggaaaatgcattgttcccacatgttttattttccgatgataataaaaagaagtcaatttaacggctttccggcggaaaggtcacacccgaatacatcccgaactcggaagttaagctttccagcgccgatggtagttgggggtctccccctgcgagagtaggacgttgccgggccaaaagagaaccgcagacaaatcgtctgcggttttttcgtacttgtataaaaaacactgtttactgctttcaccggaatgcagcccgttttactcaaaatcactgctggaggaaggatatggaaggcggtatacctcaatgaaatattttccacaaaatgaaattcttttttgtttgcaaatttattttttaaacaattgcatcttattgaataattttttcttcgtgagataatgatcatgtaatatagataacgttttctttagagcccctgccaaaataaaaatatacccttgagcgaggctctgaattaaaatagagggccaggatcagcctgcccaggaatgtagcaatggaaacgataacttaaattcgtgaacaaattcttctaccccttaaaagcgggcacagaaagagtgccaatgcatattttgaaaaggcagggaatatccctgccttcctaacatggttacttttcttccttcccgggtacaatgcagcttccatctgcacaggcaacgtcttcttcggtggacaggtcttgcagcaccggcgctgcggcttcttcctgccatactttctgaagggcgcttgtaaaggtttcgagcggctgggcgccggagatggcgtatttttggttgagaataaaaaacgggacgccggtgatgccgtattgctgtgcgatggcttcatccacgcgtacgtcatttaaataggcattcgggtcacgaagcacttccaaagctttttcccggctgaggcctgcagattcggcgattgcggcaagtgtttcgtggtcaccgatatacgctccttctgtaaaataggcgtggaacagtttttcggcgagttccgcccctttgccttcagccacggaaaatttttcaaggcggtgtgcatctagcgtgtttgtcggcttcatgttgtcaaaatcataacgaagccccacgcttgccgcctgttcaccgatcccgcggtttgccttttttgcttcttccatgctgatgccgtatttttcagcaatcgcttcgtggatatttttgccgatgctttttccggcagcagggtcaagttcaaacgctttaaattcaacttccacctggctccggtgcggaaattgtgccagcgccatttccaaacgccgttttccaatatagcaaaatgggcagacaaagtcagaccacacttcaattttcatatgaacaccccatttcttcgattaccccctatcgtatcacaaaaaagttttattataaaaaatcatgcttatggatacgtttactttgctccggacgtgatatgatggaaaagaagcaaaatgaatgtgtgatgaggaggggtaacatcattgctccacaatagtattgtcatggtgctgattatttttgttgtcaatattatctatgtatccttctcgacaacgaggatgattctaacgttaaaaggataccggtatattgccgcttttgtcagcatggttgaaatcatcatttatatcatcggtctcgggcttgttcttgataatctgaataagatccaaaacattattgcgtatgcggccggttacggaatcggcgtcatagtgggaatgaaaattgaagaaaaactggcgctcggctatattacggtcaatgtcattacaacaggggcaaatttggatttggcaaaaaaactgcgggaaagtggctacggcgtcaccacatgggatgcgcacgggcttgaaggggaccggattgccctccaggttttgacgccgaggaagtatgagctgaaattataccacgcgattcagacgattgatccaaaggcctttattattgcttacgagccgaaaaccatttacggcggtttttgggtaaaagcggtgaagaaagggaaattgagcaaatgaaaaaacagtttgaagtgcttgaaaatgagaccattgcggactgtctggcaagaatggaaaaagagggcttccggccggtcagaagaatcgaaaagccggtgttccgggaagtcaagaaaagcggcaggaaagaatatgagccggccactagaaaaattgtatttgaaggaaggaaatcaagttcagacccgaacattaccggcctgtaaaacatcaattattcgttgacagcaacaagcctccctgttaagataaaaatacaaagtgaatatgaccctcatatataatgggaatacggcccatacgtctctacccggttaccgtaaataaccggactatgagggaaagcggaagttgggaatcacaaggttttccatgcttatttgtgctgcacccggatggactgctttctctctaaaatagagcgggcagatccgtccgggtttttttgtacataaacaggggagggatgcaggtggcagttgaagttggcgtcattatgggcagcatttcggactgggaaacgatgaaacatgcatgcggcgtgctggatgaattgaacgtgccttacgagaaaaaagtcgtctctgcacaccggacgccggatctgatgtttcaatatgcagaacaggcaagaagcaggggcgtaaaagtcatcattgcgggagcaggcggcgcggctcatttgccagggatggtcgcagcaaaaacgacgttgccagtcatcggcgtgccggtccggtcaaaagcgctgaacggccttgactctttgctttcaatcgtgcagatgccgggcggtgtcccggttgcaacggtcgcgatcggaaaagcgggcgcaacaaatgccggactgcttgccgcccaaattttatccacaacaaacgaacatattgccaaaaggcttgaacaaagacgggaaagactttcgaaaaccgtatatgaaagcagtgatcaacttgaacaggaaaatgattaaaccggggagcacaatcggcatcatcggcggcggccagctcgggagaatgatggcccttgccgcaaaagaggcgggttttaagatcattgtccttgatcctgtgccggattgcccgtgtgcgcaggtggcggacgggcagatcacggcgccatataatgatgaagcggcattgcgggagctcggggaacgatgcgatgtgctcacctatgaatttgaaaatatcgattatgaaacattgaaaaaggccaccggatttgcccatgtgccacaaggagcggaactgatccggatcacgcagaaccgtatttttgaaaaagaagcagttgcaaaagcaggcgtccgggttgcgccgtaccgcatcgttgaaaacgcggcggatttgaaagaagctgttggggaaattggctatccatgtattttaaaaacggcgcgcggcggttatgatggaaaagggcagatcacgctccggcatgaaggggattttaaggaaacggatccgcttctttcccacggcgcatgtgtccttgaaaaaatgattccatttacaaaagaactttctgtcatcatcacccggaatgaaacaggggaaacgagcctttttccggtagttgaaaatattcatcacaaccatattttgcatcaaacaatcgcgccggcacgggtgggaaatacggtgaaaaaagaggcggagcaactcgccctaaaggtggcagagcagcttcatttaaccggcacgcttgcagtcgaaatgtttttagaagcggacggcacgctttatgtcaatgaactggcgccgcgcccgcataattccgggcattactcgattgaagcctgttcgatttcgcaatttggccagcatatccgcgcgatctgcaactggccgctccgcaaagtggaactcttgaagccggctgttatgaataatctgctcggccagcacgtcgaaagggcgcttacgcaaattccttaccagccggaatggtcggtccatctttacggcaaaaaagaagcgaaattccagcgaaagatgggccatattacagtgctgacagaggaaatcgaagagactttgctttcccttgaacagtccggtgtatggcaggatgtacagaaacgatcggaggcagcagtgaatgattgaacgctatacaaggcctgaaatgggcgccatctggacagacgaaaataaatacaaagcatggcttgaagtggaaatccttgcctgtgaagcatgggcggagcttggggaaatcccgaaagcagatgtgcaaaaaatccgtgaaaatgccagatttgatgttgaaagaattttagaaattgagcaggaaacgcgccacgatgttgtcgcttttacaagggccgtttcggagtcgctcggcgaagaaagaaaatgggtgcattacgggctgacgtccacggatgtggtcgatacggcgctttcttatttgatcaaacaggcaaatgaaatcatagaaaaagaccttgaacgttttattgaaattttaaagcaaaaagcaattgaacataaatacaccgtcatgatgggccgtacccacggcgtccatgccgaaccgaccacttttggcctgaaaatggcgctctggcacgaagaaatgaaacggaatctcgaacgcttcaggcaagcggcggacggcatccgttacgggaaattaagcggtgctgtcgggacctatgccaacatcgacccgttcgttgagcagtatgtctgcgggaaactcggcttaaagccggcgcccatctccacgcaaacgctgcagcgcgaccgccacgcttattacatcgcgaccttgtctttgatcgcgacatcgattgaaaaatttgctacggaaatcagggggctgcaaaaaagcgaaacccgtgaagtggaagagtttttcagcaaagggcaaaaaggatcgtccgcgatgccgcataaacgcaatccgatcggttcggaaaatatgaccgggatggcgcgggtgctgcgcggctatatggtaacggcgtatgaaaatgtctccctttggcatgagcgcgacatctcgcattcttccgcggaacggattattttgccggatgcaacgattgctattaattatatgctgaaccggttcggcaatattgtgaaaaacctgaccgtcttcccggaaaatatgaaacggaacatggacaaaacgctcggtctcatttattcacagcgggttttgcttgccctgattgataaaggcatgtcccgtgaagctgcatacgatacggtgcagccgaaagcaatggagtcgtgggaaaaacaagtgccgtttaaggaactgttgaaaaaagacccggccatccaaagcaggctcacggaagcagaactcgaggaatgctttgactaccattatcatttgaaacatgtcgatacgatttttgaccgtctcgggctgaactgaaccggggcggccgggtgaattcagcccggctgtcccggaaaataaaaagcggctgcgaaatttgcgcagcaggctaaggaggcaggcgcatgcttgtatacgaggggaaagcaaaacggttgtatgaaacagaggatccggatgtattgcgcgtcgagtacaaagactcggccaccgcgtttaatggcgtgaaaaaagcggagattgaaggaaaagggaagctgaacaatgagatttcaagcctgatctttaagcggcttgcggacaaaggggtcaagagccattttatccgtaaaatatcggaacgcgaacagcttgtgcgccgggtggagatcatcccgcttgaagtagtcgtccgcaatgtcgtggcgggcagccttgcaaagcgcctcgggcttgaagaaggaacgccggccgggcagccggttgtcgaattttattataaaaaggacgaactcggcgacccgctcattacagaagaccatgtacggcttttagggattgcaagttcggaagatttgcagtttttaagaaaacaggcgctcgttgtcaatgagagcctaacggcgctgtttgcggaaatcggcgtccgccttgtggatttcaaactcgagttcggacgcggacgtgacggggcgatccttttggccgatgaaatttccccggatacgtgcaggctctgggaccgggcaacgaatgaaaagctggataaagatgtgttccgccgggatttgggcagtttaacggaagtttaccaggaaatcttaaatcgcttgagaggagatatttcgcatgtataaagtgaaagtctatgtcaccttgcgcgagggcatccttgatccgcagggggctgccatcaaccagtcgcttgtccagctcggctacagtgaagtgcaggatgtgcgggccggaaaatatttagagctgcttgtagaaaaggcggaccgggacctggatgccgtcatccgggaagtgtgcgggcgggtgctctcaaatcctgtcatcgaagactaccgctatgaaattgaggagtgtgttgcgccgtgaagtttgcatgtcttgtttttccgggatcgaactgtgacaccgatatgtttcatgcgattcaagatgcacttggtgaagaagcggcatacgtccgccatgatgcggatagcttagatggttttgacgggatcctcctgccgggcgggttttcgtacggcgactatttgcggacaggcgcgatcgcacgcttttcgccggtcatgcaggctgttgcaagagctgctgaagagggcaaaccggtgcttggcgtctgcaacggatttcaaattttgcttgaagccggccttttgccgggggccatgctccggaacgcaggcttgaaattcgtctgcaaaacggtgccgcttgtagtcgaaaatgccgcaacgatgtttacttccctgtatgagcagggggaaacgatccggattccggttgcccacggggaggggaactatacttgcgatgcggaaacgctcgaaaagctgaaagaaaacaggcaaattgtgttcacgtacggggaaaatcctaacgggagtattgccaatattgcgggaattatgaacgaacaaggcaatgtgctcgggatgatgccccatccggaacgggccgttgaagcattactcggaagcacggacggtttgaagctgtttaaatccattgtaaaaaactggagggaatcccatgccgttattgcttgaaccaggaccggccgaaatcaaaagccaaaagatttaccgtgaaatcgggctgacagacgaagaattcgcacgggtcgaaacgattctcggccggacgccgaactataccgaaacagggctgtttgccgtcatgtggtcggaacattgcagttacaaaaactctaagccggtcttaaaaaagtttccggtaaaaggcgaacgcgttctccaggggcccggggaaggcgccggcatcattgatatcggcgacgggctggcggttgtttttaaaattgaaagccataaccacccgtccgcgattgaaccgtaccagggcgcggcaacgggcgtcggcgggattatccgcgatgtgttttcgatgggggcaaggccggttgcgcttctcaattcgctccgtttcggcgaactcgattccccgcgggtgaaacgtcttttcaaagaagtcgttgccggaattgcgggctacggcaattgcatcgggattccgacagtcggcggggaagtggcatttgatccgtgttatgacggcaatccgctcgttaacgcgatgtgcgtcggcctgatcgaacataaagacattcaaaaagggcaggcgcgcggcatcgggaacacggtcatgtatgtcggcgcaaaaacaggaagggacggcatccacggcgccacctttgcctccgggcagctcagcgaagattcggaggaaaagcgcccggcagtccaagttggcgatccgtttatggaaaaactgctccttgaagcctgcctcgaacttgtccgccatgatgcgctcgtcggcatccaggatatgggggcggccgggctcatcagctcctcttccgaaatggccagcaaggcgggcgtcgggcttgtaatgaatcttgaccgcattccgcagcgcgaaactgggatgacgccatatgaaatgatgctctccgaatcgcaggaacggatgctgattgtcgtaaaaaaaggccgggaaccggaaatcatccgcctttttcaaaaatacgggcttgatgcggttgctatcggaacggtaaccggcgataaaatgctcaaattgtaccacaacggcgaacttgtcgcggatgtgccggccgatgcgcttgcagaagatgcgcccgtctaccataaaccgtccaaaatgccggcttattttgcagcctgccaagcgatgaaaccacaaatcccggcggtggaaaatcttcaggaaacctttttccaattgctcaaacagccaaccattgccagcaaagaatgggtgtatgaacagtacgactctcaggtgcggacgaacacggtggtcatgccgggctcggatgcagccgtcatccggatccgcgggacaagaaaagcgctcgcgatgacaacggactgcaacgcccgctacgtctatttggatccggaaacaggcgggaaaatcgcagtggcggaagcggcacgcaacattatctgttccggagcccagccgcttggcgtgacagactgcctgaactttggcgcaccggaaaagccggaaattttctggcagctcgaaaaagcggcagatggcatgagcgaagcatgccgcaagcttgaaaccccggtcattggcggcaatgtctcactgtataatgaaacattgcaaaaaacagaaaacggggaagtgtccgtacaggctgtatatccgacaccggttgttggcatggtcggacttctcgaagacatcaaatatgtgaccacgcagacatttaaacaggctggtgacctcatctatctgatcggggaagcaaaaccggaattcggcggcagcgaactgcaaaagcttacggacggccaaatttccggaaaaccgccggcactcgatttggaaactgaagcccggcgccagcaccaactgcttgctgcgatccagtccggccttgtgcaaagcgcccatgacgtctcggaaggcggttttgcaccggcactcgctgaatgcctgtttgggacggaaaatttgggggccaatgtggttttaaaaggcaacccggttacggcgttattcagcgaaacccagtcacgatttattgtgtcagtgaagaaagagcaccagcaggcgtttcaaaaattggtggatgaggctgtttggattggcaacgtcacggatgataagcaaatggctgtcaaaggggaaaacggggagacgtggattcaggcggatacagaggaatgcgaaacggcctggaaaggagccttaaaatgcttgctgaaataaagggattaaatgaggaatgcgggattttcgcggtatggggccataaagaagcggcacagcttgcctattacgggctccacagcctgcagcacagggggcaggaaggtgcgggtattgttgtcaaacaaaacgggcgcctcattggcaaaaaaggggaagggcttgtgacggaagtattttcagcccagtcttttgccgggcttgacggagatgcggccctcgggcatgtccgctacgcaacagcgggcggcggcgggattgaaaacgtccagccgcttctgtttcattcgcaaaacggcagcctcgcgcttgcacataatggcaatctcgtcaacgcgcatacattgaagcaccagcttgaaatgcagggcagcattttccagacgacatccgatacagaggtgctcgcccatttaatgaaaagaagcggctaccgcaccatgaaggaacagatgaaaagcgcgctcacgatgttaaagggggcgtatgcatttgccgtcatgaccgaagacgagctgcttgtcgcccttgatccgaacggtttgcgcccgctttcactcggacaaatcggcgacgcttattgcattgcttcggaaacatgcgcgcttgacattgtcggggctgagtttatccgcgacatccgccctggtgaactcgtatcggtcagcagccgcggcattgagtcggagccgtatgcgtatgctgcgaatccggccatttgcacaatggaatatgtttatttttcccggccggacagcaatatccacggcatcaacgtccatgccgcccgcaagaatatggggagaaggcttgcaatccaggcgggcattgacgcggatgtcgtaaccggcgtgccggattcaagcatttcggcggcgatcggttatgcggaacaatccggcatcccttatgaaatgggcctgatcaaaaaccgttatgtcgggcgcacgttcatccagccgtcgcagtcgctgcgcgaacagggtgtgaaaatgaaactgtcgccggtgcgcgccatcgtcgaaggaaagcgggtggtcatggttgatgattcgatcgtgcgcggaacgacaagcaaacggatcgtcaccatgctccgcgatgccggggcaacggaagtgcatgtatgcatcagctcgccgccgatgaaacatccgtgtttttacggcattgacacatcgacgcatgaagaactgatcgcagcccgccacagcgtggaggaaatccgccagatcatcggcgcagacaccctcacttttttgacggttgacaatatgctcgaggcaatcggcaggccggcgatcaatgaaacatgcggccagtgccttgcctgttttaccggcaagtatccgacggaaatttatccggatacggtgctgccgcatgaaaaagaactgattcaaaaatagcaattaacggaggattcctatggcaaacacataccgggatgcaggcgtcgacatcgaagcaggctatgaagcggtcaaacggatgggaaagcatgtggcgcggacaaaccgggcgggggcaatcggtgcactcggcggatttggcggcatgtttgacttatctgcgctccattaccgcaagcccgtgcttgtttccggaacggacggcgtcggcacaaaactgaaacttgcctttttaacaaacaagcatgatacaatcggcatcgactgtgtcgccatgtgcgtcaatgatattattgtccagggggcggaaccgctttttttcctcgattatattggttgcggcaaccagaacccggaaacgattgagcaaattgtaaaaggcgtggcggaaggatgcgtgcaggcagggtgcgcgcttgtcggcggagaaacggcagaaatgccggatatgtatgaagaaggcgaatacgatctagcgggatttgcggttggcgcatgtgaaaaagaggcgcttgtcacggggaaaaacaccgcgcccggagatgttttaatcggccttgcgtcaagtggcatccacagtaacggctattcgctgatccggaaaatttttctaaaagaccatgcgatgaccgttgatacgattttgccggaactgggccggccgcttggggaagtgctgttaaccccgacaaaaatttacgtcaaaccggtgctttccgcgttaaaaaaatttgaggtcaaaggaatggcacatgtaacaggcggcgggttttatgaaaatatgccgcgcatgctcagagccgggctcggtgttgagatcagccttggttcatggccggtcccgcccgttttttccgctgtggaatcttacggaaacgtcagcctcgatgagatgtttcacgtttttaacatgggaatcgggtttgtcctcgcggtgaatgcggaagatgcacaggctgctgtttcctttttcaaccagtccggggaacaagcttttatcatcggccatgttacaaatacggcgggtgtccgttttgcagcagggagcagaggcgatgcataaaatagctgttttcgcatcgggcagcggcacaaatttccaggcgatttgtgatgcagctaaaaaaggggaactggatgccgcgattgaactgctagtatgcgaccgtgaagatgcgtatgccatccgccgggcagcacaagaaaacatcccggcgtttgtattcaatccgaaaacgtacccggataagcgggcgtatgagcaggaaattttggcgcaattacagaaaaaacaaattgaatggattgccttggccggctatatgcggctgatcgggcaggtgctactggatgcgtatccgcggaagattattaatatccatccgtcgctgctgccggcttttccgggcaaagacgcgatcgggcaggcgcttgcggcaggcgtgaaaataacgggcgtgaccattcattatgtcgatgaaggcatggataccgggccgattattgcgcaggcggctgtccctgtgcttgacggggacacatacgaaacattagcggcaagaatgcatcagacagagcatgtgctgtatccggatgtgctcaagaagctggtggaaaatcaaaccaacatggaggttttaccggaatgaaaagagctttaatcagtgtatcggacaagacaggggtaacggcatttgcacaaagtttaagcgggctcggctttgaaattctctcaaccggcggcacgaaaaaagcgctggaagaagccggcgtgcctgttacgggggtggaagaggtaacaggttttccggaaattttggaaggcagggtaaaaacgctccatcccaacatccacggcgggcttttggcaaaacggatcccggagcatgaacagcaaattgcagcgcaagggatcaaaccgattgacctcgtctgtgtcaacctttatccattccggcagacgattgcaaaggcggatgccacggaagaagaggccatcgaaaatattgatatcggcgggccgtccatgctgcgtgcggccgcgaaaaattttgaatatgtcaccgttgttacggacgcgggggactacggcaaagtgattgacgaaattaaaacgcacggcgatgtgacgaaagatacgaaaaaagcgctggctgcaaaagttttccgccatacagccgcgtatgacgccatgattgccgattatatgacaacgcttgttggcgaagaggccccggaaaaggccacgtttacatatgagctcaagcaaacgctccgttacggggaaaacccgcaccaaaaagcaagcttttatatcaacccgcttggttcgccattttcgattgcacacgcaaggcagctgcacggcaaagcattatcgtacaataatatccgcgatgcagatgccgccctgcagatcgcaaaggatttcaaggaaccggcagcggttgccgtaaagcatatgaacccatgcggcatcggggtcgggaactcggcgcttgaagcgtataaaaaagcgtacgaggcagacccaaagtcgattttcggcggcatcgtcgcattcaaccggcctgttgacccggaaacggccaggctgctgcatgaaattttcctcgaaattgtgattgccccgtcgtttgcggatgaagcgtttgacattttggcgagcaagaaaaatatccgccttttgactgtgcctttttcggatgcgcacaagccggaaaaaatcattacttccgtagaaggcgggctgctgatccaggatcaggacacctatactttggatgaggcccaagtgaaaactgtcacaaaacgtaagccgacagaacaggaatggcaggctttgaaactggcctggaaagtggtaaaacatgtgaaatcgaatgcgattgtggtgacggatgctgaaaaaacgctcgggatcggcgccgggcagatgaaccgcgtcggctcggcggaaattgcgttggcccaggccggtgaaaaagcaaaaggagccgcgatggcatccgatgcattcttcccgatggacgacaccgtcgaagcagctgccaaagccggcattactgccatcatccagccgggtgggtccatccgcgacgaagactccatcaaaaaagccgatgaatacggcatcacgatggtcttcaccggcatccgccactttaagcactaacagaaaagcgcggcacacgggcttcttattcgttggaggaccgatgctgcttaccgcagggaaaaggtgcagaagtatgcaagcccgggaagcagagccggacaaacagaaaagcggaggcgactgtcctgcccggcagtccccgggttctattgtatacgatcataaaattagtcagaagaccttacaaaatgatggacaaagagaggaggccacgttaaaatgaaagtacttgtaattgggagcggtggccgcgagcatgccatctgcaaaaaattatcggaaagcccccgcgttggcaaaatttattgcgcaccgggaaacggtggcatcgcccaaatcgctgaaaccgttccgatccgcgaaacggacacggcttctctgctcgcttttgcaaaagacaaaggcattgaactgacggttgtcggcccggaagcccctttaagcgcagggattgtcgacgaatttcagaatgccggcctgaaaatattcgggccgtcaaagcaggcggcgcggattgaaagcagcaaagcattcgcaaaagaactgatgcaaaaatacggcattccgactgcggattaccgcgttttttccgactatgcggaggcggaaaaatatatcgtggaaaaaggcgccccgatcgtcattaaagcagacggcctcgcagccggaaaaggcgtgactgttgcgatgacaccgggagaagcaaaggaagcgctccgtgccgctctgatcgggaagaagttcggggaagcctcaaaccaggtggttgtagaagaatttttggaaggggaagaattttccctgatggcgtttgtccggggagaggaagtgtatcccatggtgattgcgcgcgaccataagcgtgcatatgatggcgacagcggaccgaatacaggcggaatgggtgcctactccccggttccgcaaatcccggatgaagaagtgaaaaaggcagtagaacatattttgcgcccggcagccagagcgttgaaagaggaaggctgcccgtttaccggggtcttgtatgccggcttgatgctgacggaaaacggtgtgaaagtgattgaattcaacgcccgtttcggcgacccggaaacggaggttgtgctcgaaaggcttgaatcggaccttgcggaaatttttctggatctgttggacggaaaaagcccttgcatcaagtggcgcaaggaagctgtattgggagttgtgattgcggcaaacggctatccgggtgcgtacgaaaaagggattccaattccgccgctttcaaaattgcagtcttttgttttccatgccggcacatgcgtggagggggaaaggcttgtatcaaacggcggcagggtactttttgtcggaaggaaagcccgtacgctggaagaagcgggaaaagcactgtatcacgaattggaaaggctccgtttggatggttttttctaccggaaggatatcggcaaaagaaaccaggattagtccctgaggcaaaaggccggaaaatctccggccttttgcccggtagctttttgcacaggttgtaatgtttcccacatgcatgttgccttctggtctacacttcttcctggccgccattcatttgcctgttttgaatgagatccgtcacagggcagtagcggacaattccttctcccactttcatggcacccatgagcgccacacataaatagctgctgcgccacggttttttcgataatttggctgtggcccatgcaagcgaagtaagcccgcacgtaatccggagcaaggcattcaaaatgccaatattcggtgtgattttcatgatgaacatctccttttccatgttttcaaacttctttactgctttaatggataaaatatggtaatatatgaatatattagggtctccctagggaggaatgagacaatgcttgaccaacgttaccgatggaaaaacaaacaaatcagggaacatgtcgccgtgctggacgacaagctttcgccagacatggttttaacaaatgcccggtttcttcattcgacgttaagaaaatgggtgacgggcaatatttggatttatcaggaccggattgtatacaccggggaaaaactgcctgaaaagacatccggatgcgaattcaccgattgctcggggcagtggcttgtgcccgggtatattgaaccgcatgtccatccgtttcaactttataatccccaaacctttgcccattatgcagcgcaaaaagggacaacaacattgatcaacgataacctcatactcgttttattaacagacaaaaagaaagcgttttccctgatgcaaaagctccgccattcaccggttacgatgtattggtgggcccggttcgacgggcaaacggagcttgtggacgaagaaatggttttttctcacgagtgtgtaaaatcgtggctcgagcatgatgctgtcctgcagggaggggagctgaccggctggccgaaactggcggacggcgacgacttaatgctccattggattcaggaagccaagcggatgcgaaaaaaaattgaaggtcatttcccgggggcatccgagaaaacattggcaaaaatgatgctgtttggggcagactgtgaccatgaagcgatgacgggcaaggaagtgctgacccggctgatgcagggatacacggtgtctttgcgccattcatccatccgcccagacctgcctgtgttgctggatgaaatgaaagcgctcggcattgaccagtttgatcaaatgttttttacaaccgacggcagctcgcctgctttttacgaagaaggcgtgatcgacaggatgattcaaatcgcgatggaacacggggtgccgccggtggacgcatacttaatggcaagctacaatgtggcgcgttactacaatatccagcatttgcacggcatcattgcaacaggccgggtggcaagcatcaattttttggaaagcgaaacaaacccggtgcctgtttcggtcctgtcaaaaggggtatggctgaaaaaagacggcaaaggaaccgaaccggaagaaccggttgattgggcattatacggccaaggcccgcttgaacttgattgggatctcgggtacgacgacctgcaattttccatgccgttcgggctggagatgtccaacagcgtcattacaaaaccgtactccatttcgtatgacgtatcgtatgaggtgctgccagacgcctatgaggacaattttcttatgttaattgataaaaaaggaaaatggcggatcaacacactggtgaaaggatttgccaaaaatctgatgggccttgcctcttcttattcatcgacaggggacattctttgcattggaaaatcaaaaagcgatatgctgcttgcgtttaaacggatgaaagaaatgggcggcggcatcgtgattgcggaaagtgggaaaatcatccaggaaattccgctcccggtcggcgggatcatgtcggataaaagcatggatgaactgatcggggatatgaaaaaatttgccggcattttaagggaccgcggctatgcatatgatgacccgatgtattctttgctctttttatgcgcgacccatttgccctatatccggattacttccaaaggaatgtacgatgtcatgaagaaaacgatactctttccaacaataatgcgttaaaataataaagtaccggaaattttaaagcgggtcgtaaaaagggagatcgttcgtttccgaaaaacctctttctgtacggctggctgtgatttgctgttcggtgcatttaagaaagcgtgattggagttgcaaaaatgggaaagaaacgactgattggcctgatgttccttctgctggtgctatcggcatgcggccgccagcatggtacaggcggaaatcagcagggaaccggaaaatctgcggcacaccagtggacagcaccgctgacagggctccggacaacaaacaggccggcaaaacgggcggttgccgtcatgatcaacaatcacccgcttgcacgcccgcaatcggggcttagttcagccgatgttgtttatgaagccctggcggaaggggaaatcacccggtttgtcgcaatttttgaaagccatatgccggccaaattcgggccggtccggagcgccaggccgtatttcatcaagctggcaaaaggatacgatgctttatacattgcccatggctacagcccgggcgcgaaaaagctgcttgattcgggctatgtcgatgaactgaacggcatgcagtatgacggcactttgttcaaacggtcggcagccagaaaagcgccccataattcctatatcacttatcagaacattttaaaaggtgcacggaaaaaaggctatgtgatgaaccagcccccgtctcccctttcttttgcctctgcaaaagaagtgaaaaacatttcgggcatttccgcggggaaagtcagtatccgttattcaagccgggacaatttaaatgccgtgtaccggtataacgcagaaaaaggaaagtatgcccgttacgctggcggggcggagacggtggatgcaaacaacggacagccggttctcatcgacaatttgttcattgttgctgccaaacataagctgattgacagccacgggcgcaaggatattgatttaacatccggaggaaaagcgtatcttatccaaaagggaaagctccgagaagtcgaatgggaaaatgacagcggcaggattcttccgtatcaaaacggggaactggtcaaattggtgccgggcaaaacgtgggtcaatattgtacccactttaagcagtgttaccgttacagactaggaagggttcgggcagtccggcagagccgtgccggaaagcaatagagcaaaggagaagaaaaacgtttatgcaaatagataaattacgcggaaaagcgctggatcagctgtttgaagcgatcctgtcgcttgaaacgattgaagagtgctaccgtttttttgacgatttatgcactgtcaacgaaatccaggcgatgacgcagcgcctggaagtggcgagaatgttgcgcaatgataagacgtaccatgcgattgagacggaaaccggcgcgagcacggccactatctcgcgcgtcaaacgctgcctgaattacggcaacgattcttaccagatggtcctcgaccggatcgaaaaaaaacacaggcaggaaaaccgtgcagaagaagacccatcagaataaaaagaaaaaagctcttcttttaaaagaggggcttttttgcgcagaacaaccgcttcccgtgatagaatcacgcttgctggaaggttgcgcttttatttttctttttgccggtgcggcttttcaggaaagattttccggctttgccggcgggaaagcgcggtgtttccgggcatggctgttatattttcccgttctaatgaaaagcttttttgcctgtaccttcaaatgctataatgggctatgatggaagaagaatggaggatttccggttgatgtatgatgtgcgtgaatggcggcatgccttcaaattggatccgaataaagatatttcggaaaaagatttggaaaaaatttgcgagtccggcacagatgcagtgatgattggcggaacggacggtgtcacccttgataacacgttacagttaatgtcaagggtaagaagatacgccgtgccgtgctgcctcgaagtatcggatgcggacgcaatcgcacccgcttatgacctttacttgattccggcggttttaaacagcaaaaatacaaattggatcaccggtgcccaccataaagcagtgaaagcatacggggaatggatgaattggaatgagatcgtcatggaaggctactgtattttaaatccggactgtaaagccgcacagcttgcagaagcggaaaccggcctcgatgacgacgacgttctcgcttatgcacgcatggcggagcatatgttcaagtttccggttttttatttggaatacagcggaacttacggagatccgaagcttgtcgaaaaagtgaaaacagtactggaaagtaccgttttgttttacggcggtggcatccgcactgcggcacaggctgcggagatggcacgggctgcagatgtagtggtcgtcggcaatgtggtttatgaagatatacacgaggctgtgaaaacggtccgggttgtaaagcaaacaggtttgtgataaaatagaacaaacattctcatgtggtggtgaaatcatgcaatttttaaccgaccgtattctgagcgggctaaatcccgaacagaaagaagcggtcaaaacaacggaagggccgcttttgattcttgccggggcgggaagcggcaaaacacgggtgctgacccgccgcgttgcctatttaatggtggaaaaaggcgtgaatccgtataatattttagcgattacgtttaccaataaggccgcccgcgaaatgaaggacaggattgccgggatcatgggcggtgccgctgaggaagtgtggatatccactttccattcgatgtgcgtgcgcattttgcggagggatatcgacaggatcggctttaaccgcaatttttccatccttgacgcgaccgaccagctatcggtcattaaaaaccttttaaaagaaaaaaatctggatccgaaaaaatttgacccgcgggcgattttagggaaaatcagcagcgcgaaaaatgaactgattgattttgaacagtacgccaaacaagcgggcgatttttttgaccaaattgtcagtgatgtatacgaagcttaccagcaacgcctgaggaaaaaccagtcgcttgactttgacgatctgatcatgatgacaatccaattgttcaagcgcgtcccggaagtcctcgaatattaccaaagaaaattccaatacatccacgttgatgaatatcaggatagtgcgacacgttgctaattgaaaagattagccaccagcgaaagctgggagaactgatgattcgaagagtcgaatgaaggagtaacgcccggaaaggctctccctgatcctccgaatagcgtcaagataggtaaggatcttgaggttataagctcggtgaagtcggctgaatgctgccgtaacaagtcaagttgacgaaagctttccagaggtggaaggtgcagcaaataagccgggggtctataaaacactcatggtgagaatgttagtgaacaacaactaactgacgaaaatccgaatgtacggttctagaggtatagatgctagaaatggcattgtcacggtacgtggcgctagtgaggtggagtaagaattgtctttatgaaacaccttgacgtgttacaggcacgtccaagctagcaggactagaggattcacctaaaagtgtatgtacagatagaatcatcggaacgtgggaagctgacaacgcggaggacttaccggccaatgaagcggtgataaggaaaagcgaaggctataacttatctttatgtcagtgaaagtggtggcacagtaccgttgaggtgatggaaacatcatggagggatagccactagtcaatttgttaaagcaactacatttatcgtctatcaggttcgagtatgactaagagaaacgaaagctgccagtaaccgggtggtgattagttgactgataacaaccaaaagctaaagaagaaacaaaaattgcgtaataatgaatactacaatatgcaagcagcgttagatacactttacgctcaaagtaaaaatggctacaaattccgagagctgtatgatcttatcattgatgaaagaaatattaagttggccttccgaaatatcaaaaagaatcgcggaagcaaaacgagtgggacgaatggtaaaaccattcttgatattggggaaaaggatccttcgtctcttataaagtatgtaagagcaaggatgtctaattttaaaccacatcctgtccgaaggatagagatccctaaactggatgggaccatgaggcctttaggtataccaactattgaagaccgcttgattcaacaatgtgtgaaacaagttcttgaacctatctgtgaagcaaagtttcatccacacagttatggttttcgtccaaaccggagtgcacatcatgcattatcaagggcagtaaccttggtaaacaaaaacaaactccattatgccgtggacattgatattaagggattctttgacaatgttaaccatggcaagctactgaagcagatatggtcactgggcattcaggataagaaggtcattaatattttatccaaaatgcttaaagcggaaatcaagggtgttggtataccaggaaaaggaacgccacaaggcggaattctttcaccactactatccaacatcgttttaaacgagctggactggtggatcagcagccaatgggaaactttcaaaacgaaaaagaattacaatcgggaacgaatgattggcaaaaggctggtattagatcaaagtgcaaaatatcgagcattgagaaaaactggactgaaggaaatgtttattgtccgatatgccgatgattttaaaatcttttgccgtaatcataaagatgcattcgctatttttgaagccgtgaagaaatggctgaaagaaaggttgggactagaaaccagtcctgaaaaatctggggtaattaatttgcggaaaaagcattctacgttccttgggtttaaaatgaaagctatcccgaaaaaagacaaatttgtagctaaaacaaatatgagtgataaagcgaaaaagaaggccattgcaaaattacgtggccaaatcaaaaaggttgagaacagcccgcgagaggtatctaagctaaatgcaacgattgtaggaatccaaaattattaccggtatgcgactcatatcactgttgatttaagtaaaattggcttctcggtcagaaagatcctgtacaaccgaacgaaagctattctaagtcagaaaggtacaaagtcaaacacatttaaaaaattgtatccgaaatttaatgggaaagtgatttttatccatggagtaaatgtttttccaattgatcatataagaactaaatatccaactaattttagtcaggatatttgcccttatacagatttgggaagacagaagatacatgatcaacttaagggatgtaatcaggcaatcattcatcatcttatgtataatcctttacctgatcaaagcatggaatataatgataatcgcatatccctttacgtaggacaacttggacaatgtgcagtaacaaatgtaccattagaacttggagatatggaagttcatcacaagataccaagaaatcaaggtggaagtgatgagtatagaaatcttatattcataaggaaggatgttcacaagttgattcactcaacagaaaaagtgaccatccagaaatatctccaaaagctgaacttagacgagaatgccctagataaaatcaacaaacttcgtgttttggttggaaacgataaaatagtaggtattataacgcgataacaaattgatggaacgccgtatgaggggaaactctcacgtacggtgtgaatgggggggaaagctggagatgacttcaaaggcttacctatccatatccaataaatctcagtatacacttgtgaaattgttggcttcaagatttcagaatttgtgtgttgtcggggataatgaccagtcgatttaccgttggcgcggtgcggatattgccaatatcctgtcgttcgaaaaagattatccgaacgcgaaagtcattttgcttgagcaaaactaccgctcgacgaagaaaattttacaggcggccaataaagtcatcgaaaacaacgcaaaccggaaaaagaaaaatttatggacggaaaacgatgaggggcaaaatctcgtctattaccgggcggatagcgaacagggggaagcgcagtttgttgccggaaaaattaaggaactcactgcatcgggcaaacgccggcactccgatattgcgattctataccgcacgaacgctcagtcccgtgtcattgaagaagtattaatgaaatcgaacattgcctacaatatcgttggcggcacccgtttctacgaccggaaagaaattaaagatattcttgcgtatttgcgggtcatcgccaatccggatgacgacctcagcctggcccggattatcaatgtgccgaaacgcggtatcggccagacttcattggataaaatcgtgcgatatgcggcggaccaggaggtttccttatttactgtccttcaggaaatagattttatcggcctcagcccgaaaattgccaaagcctgccgggaattttatgagcttatcagcaattttacccggatgcaggaatatttatccgttaccgaactggtggaagaattgctggacaagtccggctacagggatgcgctgaaactggaaaaatcgcttgaagccgaaagccggctcgaaaatatcgatgaatttctttcggttgcccaggaatttgagaaagagaacgatgacaaaagccttgtcgcctttttgacggatttggcgcttgtcgccgatattgaccggcttgaagaagataatgcacaaaaagatgctgttgtattaatgacattgcacgctgccaaagggcttgaatttccggttgtcttcctgatcggcatggaagagggcattttcccgcacagccgttcccttatggacgaagcggaaatggaagaggaaaggcggctcatgtatgtcggcgtcacgcgggcacaggaggagctgtacctgaccaatgccgaagtgcggacgctttacgggcgcatgaatatcaatccggtttcacggtttatcaatgaaattccggaagaattgatcgaggatattcgcaaggaggaaaaagaccggctcgatttccgccaggtttcgcgcggcaaaacggaaagaaaagagaaacggccgcctgttgttcctgcctggcaacaaaacggggccggcaatctttcctggcaagtgggcgataaagccgaacataaaaaatgggggatcggcacggttgtcagtgtcaagggagaaggcaaatcagccgaacttgacattgcattcccgagccctgtcggcatcaaacggcttttagccgagtttgcgccgattacaaaagtagaatagaataagtctggacaacgaaagggacacaggcggcaaatgcctcttttgccctgatggaaaggattgttgcacatggataatcacgcggcagccgcccgggcagccgaactgcgcaaactgctgaaccagtacagttatgaatattatgtgctcgaccgcccgagcgtcccggatgcggaatacgacaggcttttgcgtgaactgcaggagatcgaaaatgcgcatccggagttgatcacgccggattcaccaacgcaaagggtcggaggagaacctttatccggatttgccaaagtggtccatgatacaccgatgctcagtctggcaaatgcctttaacgaagccgaccttcgcgatttcgaccgcagagtccgggagacggccggcgatccatatgaatacgtgtgcgaactgaaaatcgacgggctggcgatttcgcttaaatatgagaatggtttattcgtccaagggtccacaagaggggacgggacgatcggtgaagacattacggccaacctcagaaccgtccgctcgataccgctcaggctgaatgaaccggtcaccatcgaggcgcgcggggaatgttttatgccgaaaaagtcttttgaggcattgaaccgtatcaaagaagaaaacggggaagaaccgtttgccaatccgcgcaatgcggcagccggctcgctccgccagctcgatccgaaaattgcggcatcccggaaccttgatacatttatgtatgcgatcggtgatacaaccgggctcaatattgccacccatagcgaagggcttgcgtatttggaaaagctcggccttaaggtcaataaagaaacaaggatatgccgggatatcggggaagtactcgaatttatcgcggaatggacggaaaaacggccggccctcccgtatgaaattgacggcattgtcattaaggtaaatgactatgcccagcaagccgcccttggcacaacggtgaaaagcccgcgctgggccattgcttacaaatttcctgccgaagaagtagtcacaaaactgaccggcattgaagtaaaagtcggccgcaccggggttgtcacgccgactgcgatactggatccggtaagagtggccggaacaaccgtccagcgggccacgctccacaatgaagatctgatccgcgaaaaagatatccggattggggactatgtcatagtaaaaaaagcgggcgacatcattcccgaagtggtccgcccgattcccgaacggagaaccggcgaggagcgggcattttccatgccgtcccactgcccggactgcggcagcgagcttgtccggctcgaagatgaagtggcgctccgctgcattaacccgaactgcccggcgcagatccgcgaagggctgatccatttcgtatcaaggaatgcgatgaatattgaagggctgggggaaaaggtcatcagccagctgttcgcgcatgaattgatccacaatgtcgcggatatttaccggctgaaaaaagaagaactgctgcaattggaaagaatgggggaaaaatcggtttccaatttgcttgccgcaattgaagcctcaaaaaagaattcgctggaaaaattgctattcggcctcggcatccgccatgtcggcgccaaagctgcgaaaattttagcagagcatttcgaaacaatggaacggctgtctgaagcaacgcgtgaagaactggaagccatacccgatattggcgaaaagatggcggattccattgttgcgtattttgaaaatgaagaagcgctcggcctggtccgggaattggctgtgctcggggtcaacatggtttataaaggccccaaacgtgcggaaaagcgcaatgcagattcgccttttgccggaaagacggtcgttttaaccgggaaactggtgaacttgacccgcaacgaagcaaaagaaaaactggaggcgctcggggcaaatgtgaccggcagcgtaagcaaaaataccgaccttgtcatcgccggggaagatgcgggcacaaagctggccaaagcggaacagctcggcattgaagtatgggatgaagcagcgtttttggaacggctcaattcataaatgcaagggaaagcgagaaatcaaaaaggtggaaaggcagtatgaaaaaatggtaccccctcatcatatcgatggttttactggctggctgtacaccgggtttcggctcggataacaaagtggtccagaaaagcaacaataaaaaagaaacgtccgttgtttcgagttaccagatttccgaccagtattataaaaatatttacccgtataaaacgagcaaatcgcgggggcttgttgtcagcaacttaaacacttcgtatgatatcgaggaatttgaaaccggcctgatgcgggttgcgcagagaaattacccgccggatgactatctttttcaggaaggccagtatttgacttccgacaccattacaaaatggctgaaccggaaatatacggcaaaccagttgaaaaagaaaggcctgaaagaacaggacaatgtcggcttgaatccggtgaatgatggaaaaggatcggcaaagcagcaaaacgagaaaaacccgatttatttggcgcaaattctcgaacaggattatttaacaaaagacagcaaagggaacgtcaaactgtccggcgttgccatcgggcttgccctgaactcagtttattactatcagacggaaaagtacggttccacgtatgacgtcaatattccccaaaaaacgttagacgaaaaagggaagcagattgcatcggaagtcgtccggcgcctgcgcaatataaatgcattgaaaaatgtcccgattacggtcgggctgtacaaacagcagagcaaggattccgtgattcccggaaactattttgcttacgctaccgttccggcaaacagcacctctgcagacgattggaaaaacatcaatgaaaaatattatttgttcccgtccgacgatgcggaaaaagctcatcgtgacgatgagaaaacatttgagaattttaaaacggacattgaagactttttcccgaattataccggatgcattggcagggcaagatacagtgacgggcagcttgctgatttaagcatcgacattccgatccagttttacgggcaggcggaagtcattgcttttacgcaatatgtcgccggcctggtggtcaaaacattcccagattacgtcaatctacaggtgagcatcacggccaacaatgaagcaaaagcgctcattgtaaggaattcaaaagcaaaagacccaaccgtccatatttataactgaaaaaagagcagatacatgaaaaatgtatctgctctttttagtatgtcacatttcaaaaaaggaaaacattttttaaatttttttcaaaaaaaggctaccatttttgaaagtgctgttatataataaaaacatgcaaaacacactgtattataacaagaaagggagtgcagatatggagaccaaagcaccaggcattaccgtaacgggatccatccaggacgggtatgacgaaatattgaccccggaagcgctgcagtttttggaacagctggagcggcatttcggcgaaaggcggcgcgaactgctggcctacagaaaaaaacgcgatgaagaaatcaagtcgggcaagcttccgcattttctcgaagaaacggcctccatccgcgaatccgactggaccattgccccgcttcccgaagatttgcaggacaggcgtgtggagattaccgggccggttgaccggaaaatggtgatcaatgctttgaattcaggcgcaaaaatatttatggcctgctttgaagatgccacttccccgacgtgggagaatatcattgaaggccagatccatctccgtgatgcggtcaaccggacgattacgtttaccggcccgaacggaaaagaatacaagctggccgatcatcccgctgtcttaattgtcaggccgcgcggatggcatttggaagagaaacatattttagtagacggcaaacccgtatccggcagtttaacagattttgggctctatttcttccataatgcccgcaggctccttgaaaacggcacaggcccgtacttttacctgccaaaaatggaaagccatctggaggcgcgcctttggaatgatgtttttatctttgcgcaaaagtatatcggtatcccgaaaggcaccattaaagcaactgtcctgattgaaacgatcatggctgcatttgaaatggacgaaatcctgtatgaactgaaagagcattcggcaggcctcaactgcgggcgctgggattatattttcagctatattaaaaaactgcgcaccaatccgcagtttattacgccggacaggtctctcgtcaccatgacggtaccgtttatgcgcgcttattcgcttttgaccattaagacgtgccaccgccggaatgcgccggcaatcgggggaatggctgcgcagatcccagtaaaagacgacccggcaaaaaatgaagaagccttccaaaaggtgcgcgccgataaagagcgggaagcaagagacgggcatgacggcacctgggtcgcgcatccggggcttgtgccggttgccatggaagcatttaacaaagaaatgcccgagccgaaccaaatccattccggcaagcagatggattttacggcaacggcagatgatctgctcgctgtgccgcaaggggaaattacggaaaaaggcatccgcgaaaacatttatgccggcatccagtacatcgaatcctggctccgggggaggggcgctgtgccgatctcgaacttaatggaagatgcggcgacggctgaaatttcacgcacccagctttggcactggattcgccatccgaagggcgtgcttgcagacggcagaaaagtgacgattgagctatatgaacaaatcaaagcggaagaactggaacgcatccgccgggaaatcggggaggaatattaccgggccggccgttttgaagaagcagtggccttgtttgaccggcttgtcaaagaagatgaatttattgaatttttaaccttgccggcgtatgaactgctgggctgatagaatggcaatttgacaatgaatgaacgcaacaaggggagacgtgcaatgaaaggctcttgagccatacagagaggaatcgtgtgaatatcacaaatcgctctatatgttagctgctttcgccgcagctgtaacaaaggggaatcgtttgaaccccgaggaagccttattttgcctgcggctttacattatattgaaaaaatgggaggaatttttgatggtaaacgaaaaagcgcttgaactgaaacgaagctgggagaaagatgaaaggtggcaggggattgtccgcccgtattctccggaagacgtgctcaaactgaggggttctgttcaaattgaatatactttggcgcgcaggggggcggaaaaattctggaacctgctgcatacggaagattatatccatgcattgggcgcactcacgggaaatcaggctgtccagcaggtaaaggccggattgaaagccatttatttaagcggctggcaggttgcagctgatgcgaacctggccgggcaaatgtatccggaccaaagcctgtatccggcgaacagcgtgccgaatgtcgtcaaacggatcaaccaggccttgcagcgcgccgaccagatccaccatgcagaaggggacgaacggattgattggtttgcaccgatcgttgccgatgcagaagccggctttggcggcccgttaaacgtattcgaactgacaaaagcgatgatcgaagcgggcgccgcgtctgtccatcttgaagaccagctttcttccgagaagaaatgcggccatttgggcggcaaagtgttgcagccgacacaaacagccatccgccacttgattgcagcccgccttgctgctgatgtcatgggcgtgccgaccgttattattgcccgtacggatgcaaatgcggcaaatctgatcacaagcgatgttgacccgtatgatgcgccatttatcaccggggaacggacagcggaaggcttttaccgcacgcaggcaggcatagaccaggcgattgcccgcggacttgcttatgcgccatatgccgatatgatctggtgcgaaacgagcgagccgaatctggatgaagcacgccggtttgcagaagcgatccatgaaaaattcccgggcaaacttttggcttacaactgctcgccgtctttcaactggaagaagaaacttgatgacaaaacgatcgcgaacttccagaaagaaattgcgcgcatgggctataaattccagttcgtcacgctagccggcttccatgccttgaaccacagcatgtttgaactggcccgcaactaccgcgaccgcggcatggcggcctattccgaactgcagcaggcagaatttgcgaacgaacaatatggttacacggcaacacgccatcagcgcgaagtcggcaccggctatttcgatgaagtatcgatggtcatctcaggcggcacttcttctactaccgcacttacgggatcgaccgagcaagaacaattcacccattaatggggacccgtaaaacggagaggctgaagcagcttctccgttttcttttttgcaacccccggcgccccccttgcttaagggcgggcttttctgctatgatcaatagtattgcagggttcgattcgccccatatgaacggacagtcaggccccgctttccgggccgtgctgcggggcaatgaactgcacgcccgattgggttccacgtacaattgatgcgacttttataacggaggtgaaaggctatgcctgatatttcaaaagaacaagtccaacacgttgccgacctggcacgccttgaaatgaatgagacggaaacggagaaatttgcgaaacagctgggggatattatccattttgcggaatcattaaatgaacttgacacaacaggggttctgccgaccacgcacgtgcttgaaatccgcaatgtcatgcgcgaagatacggtggaaaaaggactgccgcgcgagcttgtgttgaaaaatgcgccggatacccaggacggcatgatccgtgtgccgacaatcgtagaataaggaggggaaagcatgtctttatttgaccataaaatctcggaacttcacgagtttttacataataaggaagttaaagtttcagaacttgttgatgaagcgtatcaaaagatttcagaaacagacggcaaagtgaaagcttttttaacattggatgaagaacgggcccgcaaaaccgcagcggaactggacggcaaaatcggctcgccggaagctgaaaatatgctgttcggcatgccgatcggaatcaaggataatattgtcacgaaagatttgcggacaacctgtgctagcaaaatccttgaaaacttcgatcccatttatgatgccacggtcatggagaaattacataaggaaaatacgatcacaatcggcaaattgaatatggatgagtttgcgatgggttcgtcgacggaaaattccgcattccaaatcacccgcaacccttggaacctggatacggtgccgggcggttcttccggcggttcggctgcagcggtggcagcgggggaagtgccgtttgcgcttggatctgatacaggcggttcgatccgccagccggccgcattttgcggggttgtcggaatgaagccaacttacgggcgtgtttcccgttttggccttgtcgcattcgcctcttctcttgaccagatcgggccgattacccggaccgtggaagacaatgcctatctgttacaggcaatttccgggcttgaccggcatgactccacttccgccgatgtggaagtgccggattatgtggaggcgctcaaaggcgatgtaaaaggcttgaaaattgccgtgccgaaagaatacttaggcgaaggcgtcagcgaagaagcgcgccaggctgttctcgatgccttgaaagtgctggaaaagctcggcgccacatgggaagaagtgtcgctgccgcattcgaaatacggcgtggccgcctattatctgcttgcttcatccgaagcgtcttccaacctggcccgttttgacggcgtccgctacggctaccgttcgaaaaatgcaaccagcctcgaagaattatataaaaagacccgttcggaaggtttcggggacgaagtaaaacgccgcattatgctcgggacttttgcgctaagcgcgggttattacgatgcgtactacaaaaaagcacaacaggtccgcaccctgatcaaaaaagactttgatgatgtgctcgaaaaatatgatgtcatcatcgggccgaccacgccgactgcggcctttaaaatcggggaaaaaattgaagacccgttaacaatgtatgcgaatgatattttaaccattccggtcaacctggcaggcgtcccggggatctctcttccatgcgggtttgcaggcgggctgccattagggctgcaaatcatcgggaagcattttgacgaaagcactgtgtaccgcgttgcccatgcatttgaacaggcaacggacttccataaccaaaaaccgcaattgtaaggggtgaaaaagatgaattttgaaacagtgatcgggcttgaagtgcacgttgaattaaaaaccaatacaaaaattttctcgccggcgcctgcgcatttcggggcagaaccgaatacgaacaccaatgtcatcgatctcggctatccgggcgtgcttccggtactgaataaaaaagtggttgactacgcaatgaaggccgcaatggcgctgaactgcgaaattgcaaccgaaacgaaattcgaccggaaaaactatttttacccggacaacccgaaagcttatcagatttcccaatttgataaaccgatcgggaaaaacggctggattgaaattgaagtggacggcgtaaagaaaaagatcggcattacccgcatccatatggaagaagatgccgggaagctgttccacgcggcaaatgaagggtattctctcgtcgatttgaaccgccagggcacgccgcttattgaaattgtctcggaaccggatatccgcactccggaagaagcgtatgcctatcttgaaaaattaaaatccatcattcaatatactggcgtttccgactgcaaaatggaagaaggatcgctccgctgcgatgccaatatttccatccgtccaattggacaggaaacattcggcacgaaaactgaattgaaaaacctgaactcgttcaactatgtgcgcaaaggcctgcagtatgagcaggaacgccagaaacaagtgctgcttgcaggcgatgtgatccaacaggaaacgcgccgttttgacgaagcaaccggcaaaacgattctgatgcgggtgaaagaaggctcggacgattaccgctatttcccggaaccagaccttgtggatctatatattgatgacgcctggaaggaacgggtgcgcgccgaaattccggaactgccggacgaacggaaaaagcgttacacagaagaactcgggctccctgcttatgatgccatggtgctcacgctcacgaaagaaatgtccgatttttttgaagcgacgatcgcagccggcgccgatgcaaaacaggcatcgaactggctgatgggcgaagtgtccgcttacttgaattcagcccagaaagaactgcatgatattgcgcttacaccggaaagccttgccggcatgatcaaattgatcgaaaacggcacgctctcttcaaaattggcgaagaaggttttccgcgaattggtcgaaaaaggcggcgacccggaaaaaatcgtcaaggaaaaagggcttgtgcaaatttctgatgaaggcgagcttttaaagattgtgacagaagtactggataaaaatgaacaatccattattgactataaaaacggtaaagaccgggcgctcggctttttggtcgggcaggtcatgaaagcgacaaaagggcaggccaacccgccgattgtcaataaactgctgatccaggaaatgaataaacggtaatttttcaaaaaagcggtgcgccccaccgcttttttgttttaaaatgcggagatcgggtatataacgaaagggtgaaattgacgataggaggctgcaaacaatgtgtgatcgcctatttgaactgacaaccacgtgtgcatattgtttgagaaaagccggcaaagaaattgatgctgtttatccggtgtatgactggaaaacaaacaaactgctcggttattattgcaaaaaacattttttaaaagtgaaaatccggaatttgatcgaagaaaccgttgaaaaacaggcaaatccggtagaagcttaaaatacctgcgatacagttgccagttgaatagaaggttgaatgcataaaaagagcgggcaaaatggatgccggctctttttatgtaagcacatccaaaatgaatatcttttcaaaatgtactgccaaatccggcgggctgtgctataataatgatgacaattggagaaaaagaaagagagtgcgaacaacggtaaaaaaccggttcagcgtgcgggctgaaccggtttgggtgaaatcattcctcttaatcttcaccgttgtttttcgctcttgcgttaccgcctttttctccgatttcctgatagaattctttgtcatggctgtcagcagtggcttctccgccttttttgccaatttcctgatagaattctttatcatgattttccgctgtagattctccgccttttttgccgatttcctgatagaattctttgtcgtggctgtcagcagtagcttccccgccctttttgccgatatcttgatagaattccttgccatgtttttcggcagtggtttctccgccttttttgccgatttcctgatagaattctttatcgtggctgtcagcagtagcttctccgcctttgcgacctgcttcttctactgtcatttttttatctttgtctgccattcaaaatctctcctttgttcggtgattgtgaatatcgcttacggcaacatatataccaccgtccagcaggaataaacttcaactaaaaaataatagacaaaaatggaatcatctttaagcagcgcccggccggaaaacgttgcaaaaacggacatgcatcctttgggaggccggaacccgggatgggggcaaattgtcttttttgaatggttcaaaaaagcaaattgtcctttagacaaaagagggtctcaattttatttttgaaatattcaaaaaacgttggggttccggacgggctgtcctttaaaaggttttaaaagaggcctggatctgaacccgaaaggagatggaacttgcaagctgcgcgtctagtaccgaaacgtttataatagaatggaggattgcaagctgggcctgctggtcactttttttcatcgctgttgttgcgaaaaaaaggtttttctatgccggggagcgaaaagaatggataaagcacttgaaaggggaaaggaaaatggaggaacaggtggaggcttatttgaattacttaaagcttgaacatgaagagccggggctgaattttttgcagcggctcatccagcaccatctttcttgtgtcccctatgaaacgttcagcaagtttcattacttccgtgaggggatttacatacctccgtttgagacttttgtggagcatttatgggaaaaaggatggggcggcacctgttttacattaaacatcaattttgcgcggctgttgcgcagcctcggttttcaatgctcctttgtgcgtgtggtgcccggccatgttgcgctgatggttttattgaacggaaaaaaactgtatgtggatgtcggctacggctccccgatcatgaagccggttgaacttgaatcaaaacggcgccacgtgctccacggttttggcgaagacatcatttttacgcagcttgagcccggccgttacgaaatcgaccgccgttccaacgggaaatcttttgtgaaaaaaacgattgagtggctgccgcttacggaagacgatttgaaagaagatatccgtgcatcttaccttgacgacaacgccaaccagacgatgcgcagggtgaccgccgtgcgcttcaacgggcgggaatgctactatttgcgcgaccgctcattaaagattatgaactaccgcaatatccgcgagttgcacatgcgggacttcggccgctggaaagataccattggggaagtgtaccagatcggcgaagatgctttgctggaaacgattcaatttctggatgagcgcggcatccggttgttcagctggtgatgatgcgcaagtatggagagttttagggtgcacgcacaaatcatccgtgcctgcacgttcccttttcttgaaccacataaggcagcccccacgaacacggcagccgaaaaggcgcctttttgcagccaaggcgcacaccgcaccgcgctgttagtggattttttttcaaaaaagttgtatgataattcagtggatgcatgaaggatttgccccatgcagaaataacggacaacatatcgagcagtttccctatccggatctgttttggggaaactgtcctttgcctgcacgaaacgggattacataatacgcatgtacatcaacataaataaggatgatgcgaatgaaacgagcaagaatcatatataacccgacttccggccgtgaagcgtttaagcgccatctcccggatgtgctgcaaaaattagagttggccggatatgaaacatcctgccatgccacaaccggcgccggcgatgccatcaaagcggcaaggaaagcggttgaacgcaagtatgatattgtcgtggcagccggcggggacggcacgatcaacgaagtcgtcaacggcattgccgaacaggattaccggccgaaacttggcgtcatcccaatgggtacgacaaatgattttgcgcgcgcactgcaaatcccgcgtgatgtgcaggcggcaacggaaattatcgtaaaaggcgatacccttccggttgatatcgggaaaatgaatgagaaatattttatcaatatcggcggcggcgggcggctcacggaactgacatatgatgtgccaagccggctgaagacgatgctcggccagctcgcttattatttaaaaggaattgaaatgctgccttcgatccgcgcgacccagatgacgattgaatatgacgggaagctgtttgaaggcgaagcgatgctgtttttaatcggcctgacgaattccatcggcggttttgaaaaacttgctccggactcttcgatcaatgacggcctgtttacattaatgattttgaaaaaaacgaacctggccgagttcattcgggctgttacccttgcgctgcgcggcgaacatctgaatgacccgaacgtcatttatacctctgccagccgcgtaaaagttcattcgccggataaaattttattaaatctggacggcgaactcggcggagaagcccctgccgtttttgaaaacttgtaccgccatctcgaagtctttgcgccgcttgacaaaatccgcccgcaagacagggttgactgacaaaagagcaggaagcggggcatgcagactgccggctccggcgctttttaaattagtatccaatccggcattttgtgccccaaatggcaacccctgccctggcaaaaacgccggaagcagtataaaaagctcccggcgttttacaatcaactttcttttttcaatgcggaaaggctgtcgttaaattcttcttcgatgcccgcatggtgtttgtaggttgcgatgctgacaatcatgctgataatcaggttaaaggcaaaccccggtaccatggagtataatttggcatccaggccggacacggtccagactatcactgtcacggcacctacaatcataccgaaaagggcaccccagtggttcatcttgcgccagaacaggctcaaaaagatcaccggcccgaatgatgcgccaaacccggcccatgcatagctgacgagctgcaaaatggtggaatcgcggtttaaagcaagcagcgcggcggcaacagaaacgacaagcaccgcgagcctgccgaaaaataccgactctttatccgaagcattgcggcggaagaagagcttatacagatcttctgtcagcgcacttgaagtgacaagcagctgggacgagacggtgctcataatcgccgcaagcactgctgccagcacaaatccggcaatgagcggatggaataaaatctgcccaagctggataaaaaccgtttccggattatccaatttatggccgggctgatggaaataagcgatcccgatcagcgcagtaagggatgtgccgatcagcgataaaatcatccagctgatcccgattctgcgcgcgctttttgtttcttttaccgatttaattgccatgaaacggacaataatatgcggctggccgacatagccgagcccccacgcgagcgcggaaatgattcccaatgccgttgtccctttaaaaaagtcaagcaaatccggattgatcgatttcacggtatggaaggtttcaactggcccgcccgttttggtaaaagcgataatcggcacgagcacgagtgcgatgaccatgatcagcccctggacaaaatcagtccatgaaacagcgagaaatccgccgaaaagcgtgtacagtacaaccacgcccgccacgatgaccaaccctacataataggacgtatggaatgagttttcaaaaaagacggctccggataccatcccagaagaaacataaagcgtgaagaaaattaaaatgacaagtgcggaaacaagccgcagcattttggtcgggtctttaaaacggttttcaagataagaagggatcgttatggaatcaccggccacctttgtataggagcggagacgtggtgccacaagccgccagtttaaatatgctccgatcgtcaacccgatcgcaatccatgcatcggcaagcccggtcagataaatgccccccggcaatcccatcaacagccagccgctcatatcagcagcgcctgcgcttaaagcggcaacagcagggccgagcgaacgaccgccgagcatataatcatcgaggttgctcgtccgccggtaagccacccagccgatccagagcatcagcaccatataaatggtgatggaaatcatttttaatgtttgatcactcacagaagtcatttccccctttgtttttggtcctttcaacaacattttatcatcataatatctgtttaataaaggtgtatttttaaaaccggccgaatattcaagaaaacagtctgcggcaacggattgtttttcgcattcaaggccgctatatgttaaaatttccgtagccattaagacgaaaaggaagacagccatgaaaataacattaccggtccaaaagaacgaagaaatagaggttgtttttgaagatttgacgcatgacggcgcaggggtagcgaaggtggacggctacccgctgtttattaaaaacggcctgccgggggagaaagctcgtattaaagtcatcaaagccaacaagaactacgggatcggccgcctccttgagctgtacgaaaagagcccgtaccgtgtcgatatcccgaaagaagaggcgccgaaatacggcggctgccagcttgcgcatataagctataccggccagctcaagtacaaggaaaatcaggtgcgccaggcacttgcccggattgggaaaattgaaggcgcccgcatccacccgattatcggcatggacaacccgtggcattaccggaacaaagcccaggtgccggtcggcgaaaaagacggaaaactcgtagctggctttttcaaaccgagaacccatgaaatactcgatgccgatgagagcgtaatccagcttccggcggtaaacgaagctgtccgggcagtaaaagaaatctgccgggaacttcgcatcccggcttacgatgaagaacatcacagcggcgtcctccgccacatcatggcgcgttacgggagggagaccggcgagctgatggtcgtgctgatcacgagaacagcggaactgccgcaccagaaaaaactcgtggatgcgattgtgtcgcgcctgaaacaggtgaagtcaatcgtgcacaacgtcaacccgaggcgcacaaacgtgattttgggggagagaaccaaagtactgtggggaaatgaggccatttacgataaaatcggggatgtgaaattcgccatctccgcgctttctttttaccaagtcaatcccgtccagacaaaggtgctttatgataaagcccttgaatacgcaggtttgaacggcaacgagtcggtgattgacgcctattgcggtatcggcacgatctcactgtttttggcgcaaaaagcccgcaaagtgttcggagtcgaagtcgttccggaagcgattgaagatgcaaaacgcaatgcggcgctcaacgtcatcacgaatgtggagtttgaagcgggcacagcggaaacggtcatctcaaaatggtacgaggcaggcaacaaggcagatgtcttagtggtcgacccgccgcgcaaaggctgtgatgaagccctgctgcagacgattctagagatgaagccgaaaaaggtcgtctatgtctcctgcaacccggcaacactggcaagagacttgcggatcctggaagacggaggataccgtacagcggacgtacagcctgttgacatgtttccgcatacgacgcatatcgaatgcgtgtcccaactcattctaaattaaggtaactaagccttaaacaaaggagtgatgttaatgcgtgtcactgaactaagaaagcttattgaaaaatacagtaaggacgatttaagtaagattattgtcgaattgtataagtcaattccgaaaaaagtgcgtgatgaaaaaacagttgacatgatgttggaagattttcagcggtacaaagaagccgaaaagaagaaaagaaaaaaagttaaggatgttaacgtcaatgatttggaacgtgaaattgagcagttgctccaaaacgcttataagcaaaattatgtcatccctaatcactatgtcagcaaaaaggatcgttccaagtggcgattcaaagtcaaatcatacataaagcatttgcaacaggtacccgttgcaggaaaggagggaaaacgagccacagatctactggaagaactgtatgaaatgttgtgttatggatgtggctatttgatctttaacacagaaaatccctttagatctgttggtattgcgcaagttgagttattcgatattctcctaaaaagaaaatttagtaccggaattaatagtgagtctataagttttgctataaaacaagtgattaattgttatctggacatggacacgctgcggtcagatctaatcaatgtattcattgcaaatctgagaaccgcagatgcgaaagaaatagctattgaacaatgtcatcagttacgaatgggactgaaacagcgaacgatagcgcctgcaaaggaaacatgggataatcacgaatatagccgcgagcgaaaaataaatgatcttgttgaaactgtttttaggctgaagatagcattatgcgaatatgaggcagccatcagctattttaaaagtaatatccagcagcggtttaaagaagtctcattatttaacttgctcaatatgcttgaaaattacgatcagaaagattattggctgcgagaatacgaaacggcagtaaaagaaggcataatgccaagggacgagctgcaatatacctatcgatatttaaaagaaaaaggtcaatttaacggctttccgaaagaagtctcccatcctcaaggaatgtgaaggtgcgaatcgcaccaatgagtaggtgggagatgagtatgtgtaaaattttactcgcagggtcagaaggggcagatgagtggaaaaaaataggaagacactctatcatctaaatgtacaccatgaatctgttcgactgtttcccggtcagacagcccaagccgttctttgatataaagagccccaagagcgattctgacagaataagccttttcgcctttgaatttcttcttgaaggacttggcatacttttcttcggccatccaccaaggaatcatttcagcaagacggacccagcgattttctttatttaatttcccaccgaatggtagaaaaaaatcatctacaaaagttaattgatgttcggtctttttgtacatcgtaacagcctccaagtgcaaggttttttacgtgtttcctttgaaatccttacactttatattcgacaaaagtagccaaaatccttgtcaaatctggaatttttgcttattcagcaagccctatttagaatccggttctcgctgcagttttcgtgcaggaccatggagaacatttttatgttatgattctgcatttctattccaggaagcaatcatttatactttgcaaccataatgtcagcatttaagtcttatgctgtaaaagcgcatcgcttcaagtcggcctttcgattcaaatacgccagcttcaattagctttcttacgcgatattcgagaaatgaatcccccacgtattggtctaaatgcccaattacctcaccaatgacccgggctgattttataaatgctctttcctttcctgtaccatgcagtttttttactttgcctgtaataaattcatcgaaatagtcttctgaaacgccaaatattcttccattctgccaaatccgtaaagtctcccgggtttctgcaagattaagccattcttttttcaaacttgttctatcatggtccgttaacagatttccagttccatgttcatataagtgttggaatttttcagggatcatttcgcctgaatgaagcaatgtatatttgaccttttttaccggaaatcgcttttcatactcttttgacgtatttataacggttatatcaatatttttatcttttaaaagatatacagcaaatcgcaatcctgcttgttcgtgtgcattatcagctgcccaaattgttacatgttccccttcagctactgagatgatctgattgagtgatcttttaaattctttgagataatctggaagttcatcaaattcatcactcatgcacttttccatccacttaaatctggacttaactccgatttccttatttaacttgtaaatggggccaatggaaaatatatccgaaaaggagatgaccttatccttcttgtcaagccccatttttcttaatgcatgtttcaagctgcctgaagcggaggcaccaaatagaatatgtatcattctttatctttctcctttagttttgccgttttccttccttccatccaaaccaaaccagaaattgcccgagaaaccttctattggatacagatcgaatagaaaacctatcaaatccttcatgtgtcgtatatgataagagagattcgttaagccttcaggtgagttgaaccacaccatttatttttttcttctattttaacatttaattttggagaaaaaagaggtgatgcttttatgccgagttatgcaagatctagtccccctgtaaacttttgtgtgccacaatgaaagattgcaaaatagccattctaaaatctgcatcgaatggcctattttattgctgttatttggaaaattttatggaaaaagaatcagattggctttcaaataagtgcatatttctgtgtttttctgtcatctcccccttccatttacctatgttccgctgttcaccaaattgacaacgtttccgcttcgctggataataaaaccaaaatattacgaaatccgggggtaaacatgagtatcattccgttaatgaatcttcaactctcacaaaaccaggaagaattggaacgtctgaaaaaaagcaaacaggcattgctggaatcaaagcacgcactggcggagaaagaaaagcgctctctccagcccgccctgtccgcctcaacctgggaggggcaactcgcgaagcagttccaggcagtccgaaaaaacgaactgcttgaaagctataacgcaacggaaaagcaaatcaattcagccctgcaactgctggacgagaaaatcagcaagctcaccactcaaaacatccagattgaaaaagccatccaagccgaaattgtaaaaatgcgcaaaaaagaggtgtgaagatggaagtcaaaatccagttcgaatcagttgaaaagtcgcttgcgaagattcgctcacaagcccacaatttgaacatttcaatggatggcaggggttcgtatccttttccttccctttagcagcttgcttatttgaaccaaaaactggagaacctgctcactgcatatcaggccgtcacattaaaaaatgaggctgcagctaaaaaagccgtccatgccatgaaagaatatgatgaacaattggaaaaaggtttcgaaggccgggcgatgagcaggtgaaacaatgaaaactcttgatgtccaagcatttgaacaagcggccacggacacgcaaagggctctgaaggagaaggctgaacaaatcacgggcctccagcaggcgatcgactcttttgtgaacatggaagatgcgtttaaaggaaaggccgggaatgccatacgcggctacttccgggattttcaccagccgtttctcatatacctgcagtcatttttagccgggtacaacggacagctgaacgagagtcttaaagacttatcagctctcgagcccgatccgaacggctatattcaagaagcttttatccaggacagcgtcatccccgcactgaaaaagctggaaaataccgttggacacttgcttgaagacgccaatactgcaatataggaagtttcggatcttgttgcactgcccaaactggacattgatgaaaaactgtatccaatccaaaaagcgcggaaaaaagaaaccaggacgctggaacagctatatgactttgatacaaaagccacccgctccctcgaagctttagaccaggacatcgatacaatggtgaagtttgtccggcaaatggaatcgatggcgggtagcggttcgtttgatattgccacttacaacccgaaacagtttgtcacaaccgaagcctaccgcagtttggaaggcgggctcattcagaaagccggcgtaaaaccggttcaaaccgtagacggcaaggactttgaaggccatttgtccgttaagttccatttctatgaagacggagccatggtgatggaataccgcaagcccgcgagcaagcagccctattatgaactggtcaatgaaatcccaaaagaggccatccccggttcagaaaatccggacgacccgctgctggttgacatttggaatggattttatgacggcggcggaaagaccgtcggtgaaatttacactggtcttgtatcattaggaaagtccgttttagatcaagatacttatgctgcactcggaaatgatggaaacaagcgcttatcctccccaattgcaaccttgaaaagcacggcacataaatcggtcgatatggcaaagtatatggggcttgctgtccaaaaagcttttgaacgggatgtcatccacggcgatgccaaaagccggactgagttcttcacctacgggcttgcttctattggaatttctcttcttggcgacaaaggcctcagcaaactgggcacaacggcgaaaattgccaagaccggaaatctggcagaaaaggccgggaagctgaaagtcaatacagggtttgctcctgcacttgaagctgccggggcagggcctgtaaaaattccgtataatgtgatggatgagctggatgagctgggagtcaggattcagaaggcaacataaaagttctctatgcaaaaaaggggatgaattcgtttacgacgcacacatgaaaacatcatcctcgaggttcgtcaaaatgataaattttttgttttagtggtttaaaaaccaatgcctatttcactttaaatcatgaaaccaggcccgggggttaaaccgccaagcctgtctgttcattcaagtaagtataaatttaagccttgtctttgcctgcgctcctttcatgatctggatttcggcgccggggcccagaggctccgggccccctgctttgtaaaagccttcacaaaggccctgccctaaaaagttaagccaggttcacttcaatgttgattttgttatccgtgatcgtgtatatataatcttttgtaatccatctggcatttttaattgtgcaatggacgaggtcaggatctttgtcttcaagcaaaatttccagcaaactttttaattctattaaatagtcgtaatccattttcatgaacggattgtatccgactaaataactggcacgcttcatcagtttcactttctttgtttcatggctgtgccaaaaaatatcgccttgaatgatcaattggttttcctgaaggttcttcatggcttcgccaacataattttcttcaattttataaacacccggggtcactttactcagcttttccatattcatgcgtactcacctattttctcatcgcagtatggcagagaggtttttatttttataccctgtttcaaagaaggtaagccagacatatacggggtggaaaaaccgaaaaattttccaaaaaaatcttgatcgcccagagagaggccattataatgaaaatgaagattgcaaagtatcaaactagttttccgggagggatctgcatgagagcagcagtcgtcagttctgataagcaaaagctggtagaggtcaaagatgtgcagttgcgtccgcttgagtacggggaagctttggtggatatcgaatactgcggtgtctgccatacggatttgcatgtggcaaagggcgactttggcgatgtgccgggacgcattctcggccatgaaggggtcggcattgtcagggaagtcgcggatggtgtcacttctcttaaagtgggcgatcgtgtaagcgttgcctggttttttgaaggctgcgggcattgtgagtactgtttaacgggaaatgagacattttgccgtgaagtgaaaaatgctggctacagtgtcgacggggccatggcagagcagtgcattgtcaaagccgattacgccgtaaaagtgccggaagggctggatccaaggcaggcgacaagcattacttgtgccggtgtaaccacttataaagccattaaagtcgcagatgtgaagccgggcgaatggattgtcatttatggagcagggggcctcgggaaccttgctgtccagtacgccaaacatgtatttaatgcgaaagtcattgcggtcgatatcaatgacgacaaactttcactggcaaaagaagtcggtgctgatctcacctttaattccaaaacggatggcgatccggctgagtggattcagaaagaagttggcggcgcgcatgctgcagtgataacggctgtttcaaaacaggcattcaaccaggctgtccactccgtacggccggtgtcaaaagtcgttgctgtcgggctccctccggaaacaatggatcttgaaattgtgaaaacagtccttgacgggatagaagtcgtcgggtctttggttggcacaagaaaagaccttgaggaagcttttatgttcggtgcggaaggaaaagtcgtcccggttgtgcaaacgcgcaggctggaagaagttggagatgtttttaaggaaatggaagaaggcagaatacaaggcaggatggttctggatatgtcgttgaaataagtgcaggcaaaacatcataaagtaagcgaaaatgaaaatccctgtttgcacggggatttttcgctttttttccggtttgttcgtataatagggatgagtaccatgtacagggaggcgccgaacttgcggagggaaatcattgcttttttaaaagaaaaaatagatccggattttatcattgttcggttcgtatgcaaaaggatatgcccggccggatagtgatgttgacatcgctttttactaagaaggcagtatgctgacaccctatgaatgttttttgtatgcacaggaacttgcagatagattaaataaggatgtcgatcttattgacctgaaccaggcctctactgtatttcaggcgcagatttttgcaaccggcatcgtcatggatatgaaaaatgaaaatgccctgaatgtaaaacgaatgctggcgtatcgtttgtatgcaaagcttaacgaggaacgtgcctaaatattgaaaaatattgcaaaaaacggggctgtgtatggaagatgaagtggtcttgaacaagataagtaccattgagcgctccctgaaacgtgtccgggaagtgtattagcggctctcctgcaagtttagaggactttacgaaacaggactccatcattctcaatatccagcgtgcttgtgaagcatcgattgacttggcccatgcacattgctacaaaagaacagctcgggctcccacagacgagcagggaggcttttgatctgctgaaagcgaacggggttgatcaatgaagaaacggccacaaaatgaaaggcaatggttgggtttcagaatatcgctgttcatgatgaccaggccattgttttggatagtttaaagtaaatcttattttacagaaagcaggcgtaactcatgctatcatatatcgtaattggcggcggggtgcttggggcatctgctgtataccatcttgcaaaagcaggcgcagttgttacactggttgaccgggcggatcccgggcaggcaacggaagcggctgccggcatcatatgcccgtggctgtcgcagcggcgcaacaaagactggtaccggctcgcaaaagcaggtgcaaaatactatcctgatttaattgcccaattggaaaaagacggggagacggaaaccggttataaacggactggcgctctcagcatacatacagatgaagaaaagcttgataaaatgcaggaacgcgcgttaaagcgaagggaagatgcgcctgaaatcggggaagtaaaacggctgtctgccgccgagacgcatgccatgttcccgattctggacgaagggttcagtgcggtctatgccggcggtgccgcgcgcgtaaacgggaaggcattgcgcaattgcctgttaaatgctgcttgcaaacgcggagccaaagtcattcatggcaatgcccggctgcttgtggaaggcagaaaagtcatcggggttgaagtcggaagccgcacgctgcatgcggacaaaacaattgtggcagcgggtgcatgggcaaaagatttgttcaaaccgctcagtgcggcttttcaagtcagccaccaaaaagcgcagattctccatttaaaactgcaaggtatggacacaagcagctggccggtcgtcatgccgccgaatgatcagtatttgctggcattcgatggcggccgtatcattgccggcgccacccatgaaaacacggaagcttttgatttgcacacaacagccggaggggtccacgaagttttaaataaagtgctgccggttgcaccgggtttggctgaagcttcccttgttgatgtgaaagtcggattccggccgttcacgccgggttttttgcctgtgatcggcacatggcccggttatgatgggctactttgcgcaaacgggctcggggcatccggtttaacggccggcccttttctcggcgctgagcttgcaaggattgcgctcggccggaaaacagaactggatttgtcaccgtacgggctggaacaggcaattgcccctttataaacagcagggctggtcttttatcaagaaaaaacaggagcgaaacaatgaacgattcctactttgacggaattttgcatatcaaaacaaccggtgagcaaaaagggtttaatgcatcactgcattacaaccgttatgagccgacgccttatcatgcgcttgatgaactgttcgatcattatgaactggataaaagcgaccatgtggtagacttcggttgcggcaaagggcggctcaatttttatatccatcatttgtttcgcgcaaccgtgaccggcattgaaatgaatgaatggttgtaccgggaagctctcgaaaacaagaaacgctatgagagaaaattcctggtccagcccgcccgtattcggtttatatgctgccttgccgaaaattataagatactgccggacgacaaccgtttttacttttttaatccgttttctgttcaaatctttatgaaggttgtgcaaaatattttatgctcggtggaagaagcataccgggaaacagacattattttatattatccgtcgcaggactatatttacttccttgaagaccatacaccatttgaaaaaaaactcgaagtcccgctaacgcttttatacaagcataatccatacgaaaaatttgtcgtgtaccggcttgcgtgaggatgatggtgaaatgaatggatactcagctttggttccataggaagtgaatgcttggataagagaaggcttactttgatctgccttcccccgcccactcagcagatattgaaaaagccgctgaggacatcgaatttccgaattgtacggacatgacaccatgcccgcagaacggcatatgtctggtataaagcttttttccaggtaaaagccagccatacccctgaaaaatggccatcgttgatggactgggttaaaagaattcgtattggaaggaagtgaatgctgttttaaatgcaggccagcagagtatggtggtatggccgccagataaaaatcctcttgatgaagagaacgaagacttttaaggcaatgtaatatagttgaacaggcagctgcctgcgtgaaacaggcagccttaggttaaatgcgttcgattcgtgttttttcttttgcaatcagtttgattaaaaccggccctaaaattaaataaaagaagaagtttcccgcggcatggtagctgtcaaacaacagcccgccgaggtagtatgtccaaaacgcaaacggcccgccgacaaataaataatttaatgaaaccataaagccgaacaggaagccggtaaaagctgcatacagacataacacgagatgcgggacttttttgtataactctttcttgccgagcaggccggaaagcaccgcgatagtaccccacgcaagaaattgcatgatcgcaaacagccccatgccgagaaacatgtcggaaccgaagaccgtcaaaaaggcaagcgccaaaccgaagcggatgccgaaaacaaaagaactgcaaatgatgatcacagtgcacggctggacattcgggaccgatgccatcaaaatccgcccggcgacgctcagggccgccagcatggcaagaagcgccattctccttgtcagccgtgaagcggttttcgctgacttccttttttcaagcggctgattccccattttatgcatctcctatttagaatagaaccagacaacctgatcgccggtttttagtttatacgaccctgcggaaacgtttggctcttttccgtttactttatatttccagccgctcatgccgccttgatccccttcatactggccattaatgccctttacatagacggttgcaccggacccggaataatcgaggcttacgccttcagaagcggcggctttttttaaagcggaaaatgcagtgtctccgcttttataactgtatttgccgctgaaaaccggccctttgtagccctttacggttaaagaaaccgtttcggcttttgctttagatggcgctgcggtgttgccggaagcgtggctgctgccggacccggacgaagaagctccggttgtcgttttcgttgatgtgctggatgtgaccgccgttttggtatttgtggcaggtgctttatccgtcttgctgtctgcagaagccttttcttcagcatttttggagtgggcagctgaatccgccgcattgctttcggatccgcccgtattgcttttttcatccgttttgttgctgccggcggcgtccgttttctttctggttgtactgtcttttgctgccgtatccttttccttcgctgaagtgtttgcaacttgtgttgtttcagaataagttttaacggttttcgattcaaaatggaaaccgtcgataaaaaaccaggcgccgaatgcaatcaataaaacggcaatactatcaataatgatacttttatatttcattcctgctcatacccccagaaattttttacggatgattagcaggatgacgcctgcacccgcagaaagggaaccgacccagccgtgcacaggagaaacacccgttgttttggtaatgacgacttttttcggctcttgctgcgcatcttctgcagggggtgcctgggcagctgcagttgcaggtttgtcctctttttttgcatttgaagctgtttttgtttttgccggcgtttgttttttggctgcggccggtttttccaccgtattggtttttgtagtggtgttgttatgcgtaatcgtatggtctttcgtattcgtaatggtgttcgttttggttacgacttctttcgtatgcttttcaaccacttttgtagcggctgcagccgggctctggccgctgctgctgtccgccccgttaccatttgaagaagtgtcgctgccagaatccttgtccccggcatccgaatcagttgcgcccgtactgccggcatcggatttgctaatattcctgaagttatacagggtatctccttttagaaaaaggtcataggcgacaagggcctggaaaacctgttctgttgaaaagctgtctgaagattcgcttgtcgtttgccatttgtatccgccgtttttggaatctttatatgtgctgagcgcagaaacgggattcgtgccctttttaacaaaatcaccggttgacgggttaacgccgacagagacaagaccaatgatggcctgggcggttgtgcacgaattaatgccgtagttgtcaaagctggcgttttctttttctgccgccttcaagtatttgatgccgtcccggattgcctggttcacatctttatcatgtttatcctgataagtgccaagcgcggtcagtaccatgccggttgagtcaacatcggaatctgttccggacaaactccagttccagcctccgtccggaagttccgcgtcaaccagttttgctgcaattttagcaggtgtatttggtgcatcactcggaatctcataatcatccgtattcaaagcgattaaatcataggcatatccggttaccgagctctctgacgccgtatcgtatacgcgttggatcaagttcttcctttgaaagttttccgggtcctctccaattgcttttaaaacaacgatggtcttagcaagctccgtaccgtcaatctttttgtcattcacccggtctgttaaaactttccggtactgctttatctcgttggctgttagcaaattctcctttgccagtgcggctactgcaaaatcagagtttaaagcggaagatttaaaatatgatgccgtatcctttatatctttgctgacagacactgctgcaaagctttcggacgggaaagataacacgaaaataagaacaatcccccagagaatcccgaaccattttttcctcaccattaccgctctcctttccataaaaaaaaccctgtacaaaaagaggtatacaagggcaaaaatttttcgcctatacctcgtaggcttcaaataaaccggcagcttgggagaaagatctgacttaggaaaattttttccatcacagtggcgggaccgtacaggaatttcacctgtttccatcgcccaggcccgtatttagatgtcagttactaattatagaacaacccctgcctgttggaaaggacaatttctgccactgtttcattgacaaacaagcggtgctgtgctaaaaaataagatgttagcactcttgcgttcggagtgctaaaggggcattgccatcatttatacatataaaggagagatcgaagtggcggtaaaggaatttaaagcagaatccaaacggcttctcgacatgatgatccactcgatttacacgcaaaaagaaattttcttgcgcgagctgatatccaacgccagcgacgcaatcgataaaatttattacaaagctttgacagatgaaaatttaacatttgataaagacagctactacattaaaattaccccggacaaagaaaacaggacactgacggtttccgataccgggatcggcatgacagagaaggaactggaagaaaatctcggcaccattgcgcaaagcggttcacttgcgtttaaaaatgacaatgaaatgaaagacggatatgacctcatcggccagttcggcgtcggtttctactcggcattcatggtggcagatgaaattaccgtcatttccaaggctgcagggagcgatcaggcttataaatggcagtcgaaaggcgcggaaggctattcaattgaaccgtgcgaaaaagacggcaacggcacggatattatattgaagctgaaagaaaacacagaggatgaagactacgatcagtacctggaagagtaccggctgcgggccatcgtgaaaaaatattctgattttatccgctacccgattaaaatggaagtaacggaaaggcgcctgaaagaaggcagcgaagatgagtacgaagaggtcaaagaagaacaaacgctcaacagcatgatcccgatctggcgcaaaaacaaaaacgaactgacagacgaagattatgagcaattttatatggaaaagcattacggctttgacaaaccggttaagcatatccacatcaaagtcgacggcactgtgcgttacaatgcgattctttacattccggaaaaaattccgttcgattattatacgccggaatatgaaaaagggttggaactgtatgcgaatggcgtcctgattatggaaaaatgcccggatcttttaccggattacttcagctttgtcaaagggatggtcgattccgaagatttgtctctgaacatttcgcgggaaatgctccagcacgaccgtcagctgaagctgattgcgaaaaatatcaaaagcaaaatcaaacgcgaactggcaaaccttttgaaagagaaccgcgagcagtacgaagcgtttttcaaatcattcggccgccagctgaaattcggtgtgtacaatgaatttggcgcgcacaaagaagatttgcaggatctcctgatgttttattcttcaaaagagaaaaagcttgttacgcttgatgaatacgtaagtcgcatgccggaagaccaaaaatacatttattacgcaaccggcgagtcgatcgaccggattgaaaaattgccgcagacggaacttgtgcttgataaaggatacgaaatcctttattttacggaagatattgatgaatttgcgattaagatgctcatgaattataaggaaaaagaattcaggtccgtgtcaagcggcgacctcggctttgaaacggaagacacaaaagaaaccgatgccgaggaaaaagaaaacaaagatctctttgcatttatgaaagaggcactggacggaaaagtgaaagatgtccgcgcctcgcaccgcttaaaatcgcatccggtctgcttcaccacagacggcgaagtgtcaattgaaatggaaaaagtgctgagcgccatgccgaacgggcaaaatgtgaaagccgataaagtgctcgaaattaacatccatcatgatgtatttaacgcattaaaagaggcgttcgcccatgacaaggacaaatgcaagctttatacaaacctgttgtataaccaggcgcggctgattgaagggctcgagattgaagacccggttgcattttcaaatgatatttgcaaaatgatggcataaggaaggcccgcatattgcaaaaaagccacgggacatccagcaaatctacggcccccgcgacggccggcatagttgctgtgcccgtgccagtgagcaccgggacatttgcaaaccgtatggctggaacatttcatgaatagcagtagtttatatgacgaagaaggctccatctgaaagcaagatggggtctttttgtattttttataaaaaaagggttgcccgaatgggaaaggtgatgtatatttataacatattatttataaatattaactttggcgcacacgaacaatacaagggggccatccaatgaaggaacagcttagacaccatttgagtcaaatcgagtccaagctctgggaaatgagcgactacttatatcatcatcccgaacttggcgaccaggaataccagtctatgaaattgctcacggattaccttacgtcacacgacttttcggtggacaaagggattgtcggcaggccgactgcttttaaagccgtttatgacagcggaaaaccgggaccggtagttgcctttttatgcgaatatgatgcgcttccgggtgtcggccacggctgcggccacaacatgatcggaacgatgagcgcaggtgcgggcttgcttttaagcaaaatcattggtgaaaccggcggccgcgtggtggtgcttgggacaccggcggaagaaacgaacggcgcgaaagttgcgatggcggaacagggcattttcaatgggatcgatgccgcgatgattgtccacccggccgatgagtcgtatgaaagcggcgagtcgcttgcgatggacgcgatccagtttgacttccgcgggaaatcagcccatgcggcatccaatccggaagacggcattaacgcactcgacgcggcgatccagttgtttaacggcgtaaatgcgctccgccagcatgtcactcccgatgtccgtatccacggcattatcaaagaaggcggcattgccgcaaacattgtccctgataaggcggtagcccagttttatgtgcgcgccaaagcacgcgctgttttaaacgaagtggttgaaaaggtgaaaagaatcgcacagggtgcggcgatgatgaccggtgccgccgtgcaaatatccaattacgaactaagctatgacaatatgatcaccaacaagacattgtcgaaaatgttcacggaaaaccttttacaaacaaaagtgaaaaaagtcaatccgccaaaaacctcatacggatccattgatatgggcaatgtcagccatgtcgtgccggcgatccacccgtatatcggcctggatgccccggggcttgtcgcgcatacaaaagcatttgccgatatgacgattacggacaatgcgcatcagatcttatcgagcggcgcgctggctttggccatgaccggatttgaccttctcacaaatggggaacttttggaaaaagtaaaaggcgagtttgcagaaaccgttaaaaaataccggtaagcagctgaaaaatggcgatcctttttaaaatagggatcttttcgaacattgcgcattgtgttaaaatacattttgttgaataaagatacttaccaagaatgatatattcatagggggaaacattgtgaaaaagatcgtgttaggcatcgcaattgtattttcaatggtgattgcggcagcttgcggccaaacgaacagcagcaaaagcaccgcgaaaaaagaaaaaacgctcgtcatgggcacttcagccgactttgccccgtttgaaacaagggacacagcaggaaaagtcattggatttgacgcggatctcgccaactatattgcaaaagaactgggatacaaactcgaaattaaagatatgaaatttgacggattgatcggggcgctgcaatcgcaccgtgttgacatggtcctttccgggatgtccgcaacgaaagaacgcgccaaaaacgtcgacttctccaccccgtaccatcattcaggggaaatgttcgttacgttaaaaggttcccctatcaagacactgaatgacttgaaaggcaaaactgtcggcgtccagctcggcaccattcaggaagagggcgcggacaagctgaaagggaagtacaattttacggtcaaaaaactggacaactccacaaacttaattgaagaattgctttcaaaacggattcaagcagcctatctggataaatcggtcgcagaaggttatatcaagaagcaaaacctggccggctttgatgatccgacctcaagttccccgggtatggcggttgcctttccaaaaggcagcaagttgacggcaaaagtcaacaaagtgctggcaaaagcggaaaagaacgggaagctggatgagctgagaaagaaatggaaacttgacaaacagtaatgcatgcaggcgccttgctgagcagggcgctgttttttcaaaataatcaaagtgaggtgtaaggcatgaatttggatttcagccaaattgtgccttatattccttttattttaaaaggaatatgggtaactttaaaatttgtattctttgcgatccttttcgggttcgtgctcggcacgatttttgccctttttaaaatttcacatatcaaaacattaaaatggattggcgatatttatacatcgattttccggggcacgccgcttattgtgcagctgatgctcatttattttgccatcccgcagctgaccggttacgatattcagcagtttccgtccgcaattctcgcattcggcctgaactccgccgcttacgtttcggaaatcatccgggccgggatccaggcggtcgacaaaggccagaccgaagctgcccaggcgctcggcgtaccgtattatttaatgatgaaagacttgattttaccgcaggcgatgaaaaatattttgccggcgttgatgaatgaatttgtttccctgacaaaagagtctgcccttgtatcgaccatcggttatctcgatttgatgcgccgtgcccaggttgtcggcgcgcaaacgtatcacaattttgaaccgctgctgtttgttgccgcgatttactgggtgcttgtctttatcctcaccatgcttggcagacaagtggaaaggaagatgaaatacagtgattaaagtcgaacatctccataagcagttcgggcataatgaagttttaaaagatattacaacagaagtcggaaaaggggaagtcgtcgttgtcatcggaccgtccggatccggcaaatcgacctttctgcgctgcctgaatttcctggaggagccgacaaaagggcggatttggattgacggggaagaaatcaccgataaaaaaacgaatgtaatgaaagtccgctcggaaattggaatggtgttccagcactttcatctttttccgcataaaaaggtgctggacaatctgacttacgcgccgatgaaagtaaagaagatgaaccgccataccgccgaagcaaaagcgcgcgaattgctggcaaaagtcggcctgacggaaaaagaaggcgcatatccggacagcctttccggcgggcagaagcagcgtgtcgcgattgcgcgcgcgctggcgatggaaccgaaactgatgctgtttgacgaaccgacatccgcacttgatcccgagatggtcaaagaagtgctgaacgtcatgaaagaccttgcccaaaccggcatgacgatggtcatcgtcacacacgaaatgggctttgcccgcgaagtggccgaccgcgtcctgtttcttgacggcggaaaaattttggaagacagcacaccggatgaattcttttcgcgcccgaaaacaacccgggcacaggactttttggacaaagtattgtaaaaaacacagttgttcaccgaaaggagctgctggaaacgaaggcagctcccaaaaaagctaagaaaagacgttgggacaccgcctcaacgtctttttccgttctatatgttgtatactgacatgcaaaatcacttttccaatggcttcccaaacagcagggcagcctttttcttttttcacagttgcctgccgttccagtcagccggctattttcaccgtaacttcaagctccatttccacatttccctgaatggcccggctgatcatgcatgatttttcggctttttccgcgagtttccgcgcgagccggacgtcgctctcggatgcgcccggtttcagcacaatttccggccggtggatgatctttttatacgtaaatacgccgccggtcacatcgacgatcccttctgatgccattgtcaaactttctttctccaggctgctgcgttccatcatcgccgccagcgtaatgatataacatgttgcggcagccccgagcaacatttcgtccggatttgtgccggcacccggaccgcccatctccggaggaatggaaatttttgccaccagatttccgcatgcgatgttccctgtatcattgcgaagccccggccagtctgcttttaaatgaaagtgatgttctgccatgtgcaacccctcctgttaaaatttactttctgctgctgttgtgtttttgctggctgctgcttttctcccatggacggcataataaacggcaatacacaggacaacccagcccgaaaccgcaagatacaacatccggaaatccatcaaaccggcaactgtcccgagcagataaggcccagatccgcttgccaggtcaagaaaaatgaaaaacgtcgaagttgccagggctttccggttcggcggcgaaagctgaatggcaattgcctggaaactggactgcacggtgccgtagccgatcccgatcaaagctcctgacaaaagcagcatccatccgctgtgcgcctggctgagcaggacgaaaccggcaattaacaaaataaacagcgggtaaacgacaacattttccccgcgttcatcaaaccatctgcctgtgaaaggccttgtaatgacgagcgctgccgcatatacaaggaaaaaataagtggcggcgccggttagtccaatgtcccttgcatacaaagataagaaagacagcacgctggaataggcaagcgtaaccgcaaaaactgcacctgaaatcggcacggcagccggttcaaagtaatcttttactttaaaacgggccatttccttcacttgtgcattcgcaggcgccggttttggaacggataacaaaatggcagaaatcagatcgatgaatgcaatgatgcttgacaccagcacgatcatctgaaaatcggcaaaccgggtaatcagaatccctaaaaacggcccgatcgccatcgctagattcatgcttgtcgcataatagccggtgccttccccgcgccgttcattcgggatgatatccgcgacaatggcgccggccgctgtcgtaatcacgccgtgcattgctccctggataaagcgcaaaaccatcaaaaacaggagactgtcagctttaaaatgaagcaacatcaccgccagaaaaacaaccaatccgctgaccagcatctgcttgcggccgattttgtcgaaatatttaccggcaaataaccgtgcaatgagcgaagcgagcacaaatattcccgccgcaagccctgccatcccctggcttgcatggtaggcggttatgacatacatggcaatactggtcattaacaagtaaaatacaacgtgcgtaaaaaaatttgtggaagaaatcataatgaagtctttcgtccacaatttcggtttatccaaaggaagtacccccccatttctaacatacaaaaacaggtaacttcattatagaacgtttcagcaagaatattcaatgtgtttctataccagaaataaagggagccgttcacgtccctccgcaccttacacctgacatgatgcacgctatagggtgccccacgcaccaccatactgcaaagaatgcagcacgcataaaagtctgaaaatcgaccgacgcaatttttcagcccagacgcctatgcagcagagagcgcaggatagccctcgtgcatttttaacgcagcgccatccgaacaacagtgcatgttcagaacaaggcatgcagcccgctgcttcaacatggcgggaaacaaaacatacgcaattgttgccttattcctttattccggtgtatatttagaaatataaaagtttaccaagtgaatagttaaaaatagaaagactttgctaaattatcttaaaatagcattctcgtagtgtgtatggcaaaataaannnnnnnnnnnnnnnnnnnnnnnnnnnnnnnnnnnnnnnnnnnnnnnnnnnnnnnnnnnnnnnnnnnnnnnnnnnnnnnnnnnnnnnnnnnnnnnnnnnntttctattgcaaaatacactcgtagggcaaaacccgatcagcacgtctattcaatctgcaaacttcccgtaattggttcagcagatgaattttaaaaaaaacaatcttgaaaccgaatacagtcgcgcggtttaagaaatggaattgaaaaacgttaaagctgccaactgctattatttctttgcggcaaatcaaaacgaaacggtgtacattgccggacaggttttttccagtgacaaaatagaaaacatttgttattatatgataataatctttaaatgaataataggatggaggcgtctatatggattttcaattgtttccggaaggcgacggcgcaatcctgattgaagcagggaaagaaatcagccttgcaaaccacaggaaaatccgggcgatcgtttcattaatcgaaaaagcggcgcctgcgtggatgattgaatatattcccgcctacacaacagtcaccgttctgtatgaccctttcaaagtttatgcaaaatttggcgaatatccctacagatatgtatcccgctatttcacccggcttcttgaaaaagcgcagcctacatttatcccggaaccgcgcacagtcgatatcccggtatgctacggcggcaaattcgggccggatctcgaaaatgttgcccgcatcaacggccttacgcctgaagaagtgatccgcatccatgcttccggcgactacaccgtatacatgatcggatttgcaccaggttttccttatatcggcggcatgcctgaaaaaatcgcagcgccaaggaaaaaaacgccgaggctcaaaataccggaaagatcggtcggaatcgccgggaaacaaaccgggatttatccgatcgaaacacccggcggctggcaaatcatcggccggacccctgtcaaactgttccggccggaccgggatgggccaagcctcctgcaagcgggcgacaaaatccgcttccggccggtgagccttgaagaataccaggaactggagaagatgccgtcatgattaaaatcatcaaaccgggcatgctgacaacggtgcaggatctcgggcggcactaccaaaaatacggggttgtccaaagcggggcaatggatgcttttgcccacagagtcgcaaacttgcttgtcggcaatccggaaaatgaagcaacactggaaattacgctcacagggccggtgctggagtttcagaacgatacactgattgccatttgcggcagcgggttccatgctgttttggacgggaaaccggtcgggctatggcgccccgtgaaagtgaaaagcggcagtgaactcagactgaggcagggcgggaccggctgccgcgtctatttggcagtggccggcgggatatctgttccggaagtgctgaaaagcaagtcaacttatttgcgcgcaaggataggcggtttcaacggcagggcgctccaggcgggcgatgtgctcgaaaccgggactcccggggaagtctccaggcaactggctgcatctcttgaatacccgccggcatggtctgtatcgaaaaacatgctgccggattacagtccgtttccaacgatccgggtcattccgggccgccatcacgatttatttgccgcagaaagtattgaaacatttttccatgaaccataccgcctttcgcaaaattccgaccggatggggtaccgcctcgaaggtccgaaactggcggtaaaagcggcgcaggagatgttatctgaaagtgtcagctttggaaccatccaggtgccgtccggcggggagccgattgtcctgttggcagaccggcaaacgacagggggatatccgaaaatcgcccaggttgcttttgtagatttgccgttactcgcccagctgaagccgggtgataagctcaggttcaaaaaaataacgttgcaggaagcacagttgctttatatagaaagagaaaaacaaattcgcatgttgaaggcaacaattgcctatcaggcgagaaggaggggcacgcatgctgagcgttgatctgaactgtgatatgggcgaaagttttggtgcctataccattgggagagatgaagaaatactggatttggtcacttccgccaatattgcgtgcggttttcacgccggcgatccggctgtgatgcggaaaacggtccggatggcggctgaaaaagggattgggatcggcgcgcaccccgggctcccggatttgatggggttcgggcgccggaatatgcaaatttccccgcaagaggcttatgatatgaccatctaccaggtcggtgcccttgctgcgtttgcaaaagcggaaggaagtaccgtccggcatgtaaaaccgcacggcgcactttacaatatggcagccaaagatccaaacctggccgaagccattgcggaggcggtttatgacgtcagccccggcttgattttattcgggcttgccggctcggaacttgtgaaagccggagagaaagccggcttaaagacggcgagcgaagtttttgccgaccggacttatcaacaagatggctctttgacaccgcggcgcgaaccgaatgccttgattgaagaccgtgaaacggcggcaaaacaggtgatccggatgatcaaagaaggcgtggtcacctccgtgcaaggagaagatgtcagcgtccgtgcggatacaatctgtatccatggcgacggcagacaggcgcttgcattcgcggaatttatccgccagtcgcttgaacgggaaggaatcaagatagaaaaaatcagccatttgagctgaacagggtggcgccaactggaattccgaccgccacccttggaatgggaggaaagcagcacaacggcttatcccgaaaaattgcagtctctccgcgtaaaaccggtccaatgcatacggccaatatatttgtgagtctgtaagggttaaacattcataaccatccctcgcaaagccggtcccaaccaactgctggcagaaaacaagcagcacagcggcatatgcccgattggttcaccaaatcaccgcggaactgctgcagattgaaattatacattttcccatcacgtgtgaattcccccgccttaaagattacagaacaaaaagtaggggcgggggatatctgtatatagaaaaggagtgaacgggtatggtattgatcggtgttgtactgattatcattggatttgcactcagatttaacccgctggtcgttgtgaccgtttcgggccttgtcaccggattgatcgcgggcctcccgctgaaacaactgattacgcaattcggggaagcttttacaacaaaccgctatatgtccatcttaattattaccttgccggtgatcggccttttggaaagaagcgggttgcaggaacaggcgaaacatctcgtttccaaaatcaaagcagcaacggccggtaaaatcctcacgttttatctgctgatccgtgaaattgccgcagcgctcggcctgaacagcctcggcgggcacccgcagacagtgcggccgctcattgcaccgatggctgaaggggcggcggaagcaaaatacggcgatgttccggaagaagacagagaagaaatccgtgcccaggcggctgctgccgataatatcggcctgtttttcggagaagatatctttgttgcggtcggcgccattcttttaatgaaaggattttttgaccaaaacggcattaaagcggatccgatttcgatggcgctttgggggttgccgacagccatatttgtatttatcgtccattccatccggctccgcctctttgaccggaaactggaccgcaagcttggaaaaaccggaagcaaggatgtggaaaaatgatcatttcaactgagtggatttatatcatcatgggaatcgtttgctttttctgctctgcctacactttttttgatcaggcaaacagcaggcgcatcccgtccggccttttttacctgatttatgccgttacactcttgcttggaaaagtgatcccgcctttttacaccgggttaatggtgcttgccatggtggcaattgtcgcatttggcggcctgcaaaagggaagctacaacggggtgagtgcggatgagcgggaaaaaagccgcaagcggttgggaaacaagctttttctgccggcaatactgatcccggttttaaccgtattgggctcaaaattgctggccaatgtaaaaattggctcgcgtcttttgctggatccttccaatccgacgcttgtcgcgctcggcgtggcgtgtatgattgccatccttaccgcaataatgctgacaaaaagccgcccgcaaaccacgtttaaagaatcacggcgccttttggaagcaatcggctgggctgttgtccttccgcaaatgctggcgacgctcggtaccatttttacaaaagcaggggtcggcacagtggtgtcaggcctgattacaaaagtgattccggaaaattcggttttctgggtcgtgtttgttttctgtgtcgggatggcactttttacgatgatcatgggcaatgcgttcgccgcttttccggtgatggcggccgggattgcgattccgtttttgatcgagcggttcggtgccaatgcggaccagattgcagccctttcgatgttcgccggttactgcggcacgctcatgactccgatggcagcaaattttaatattgtgccggctgcgctgcttgatttaaaagataaaaaccatgtcatccgtgtacaagtgccaaccgcgttgctgacacttgcatttaatattgtattgatgtatctgttagtcaaataggaggctgggccttaccctgcttatatccatttgaaatttggagaatacgagattaaacgagagatcattgcactttattgaaggagaggaaaatggagaaaaaagtactcttaaccggttttgatccttttggcggggataaagtaaaccctgccctggaagccatcaagcaattggacggaaaaaatatggatggtactcgtatcgtcacgcagcaagtgccgaccgtatttcacgaatcgatccggatcgctgctgaggccattgaacgcgaaaagcccgatgttgtcatttgcgtcgggcaggcaggggggcgcacgcaaatcacgccggaacgtgtggcgataaatatcgatgatgcccgcatcccggacaatcagcacaatcagcccattgacgacccgattgcagcggacggccccgcggcttattggtcgacgctgccgattaaaacgatcacgaggcagctgcgggaggcgggaatcccggctgctgtctccaacacagcaggcacatttgtctgtaaccacctgttttacggcgtcatgcaccatctggcaaaaaacaacatatcggcccgcgcaggttttatccatgtgccttatattccggaacaaacaaccgaaacaggcgctccaagcatgtcccttgaaacgatcgtcaaagcgcttgaaattgctgtttccgtctccgccacgaccgaaaaagatctggtggaaacaggcggagccctgcattaagacggggcgaacggatgaagggcaaaacggcatgggctgcagtcagaaatgttttcaacaggggtgtctgggcagggcaatgatcgtcagcgtgcaacaaacggagaaaaattgtagcaaatcaaacagtgtcccgctgccagccggcttgcgggacactgtttgattttccaggaattttcctatccgaaatgttctcccgcggcatcgcggcgcctcaaaaaaaccgcctggaaagttcatttcctgacgggtttttcgcctttcttcctattgtaataaagcactgcagatcaagttgatcagaaataaagcccctaataaaatcattacagggtgcaatgtttttgccttcccttccaggattttcagaacgggccaagctacaaaaccaaaagaaaggccggtggaaatactggacgtaaaaggaatcagcacgatgatcaaaaatgccggaaaccagctgctgaaatcatcgaaatgaaggtcttttaactgctgcatcatgattgcgccggtaatgaagataatcggcgcaatggcagcctgcggaatataacccaacagcggcgtaaagaaaagcgataaggcaaacagaatgcctgctgttaccgccatgatccccgttctgccgccgctttcgattccggccgcgctttctgcagcggcaacggtcgggcttgtgcccaatatacccgaaatcaagcttgtcgcagcactcccttcgaaagtccgtttgaaattccttttatcagggaggattccttccagcatgcccatcgattcaaaaataaggatcatcgacatggaaaagactgcaagcaaaaacgggagagaaagcaggtgtgagaaatcccctttcccaacaatcgcgccatagcccgtaaaattggataaggacacatgcgcggattcgctgccgcggatgccaaacaggatgccggcaatagctgtcactgcaatgccgatcaaaaatccgccgttaacttttttgataaaaagcatcaagttgacaaaaaggccgaacaagaaaagaaggacattcggattggtgagagaggcgagttcgattaatgaagctttccccggctggatcaaagatgccttttccagcccgatttcaacaagaaacaacccgattccgactgtaatgccggtttttaaggaagccgggatggccgccgataacactgtgcccagttttgtaaaagccacaagcatatacagcacactggccagcatggaaatcgcaagcgcttgttgccatgacaatcccatattgaccacaatcgtatacgtaaaaaaggcattgactcccattccgggcgtcaggatgatgggtgcatttgcccaaaaccccataatcaggcagccaaccacggaagataaaatggtggcaaatacactcaagttgacgggaatcccggcatccgccaaaatcatcggattcacaatgatgatatacgaaatggcaaaaaaaccggttattccggctgtgatttccctttttacaatggatttatcagaaaaggcctgccataaggatggccggccggaagacagcgtgcgatcatgatagagctggtgatgagacattttgattcattccctttttatttgtatgttctattggcaaccgccctgttttgaacgggatgtttgctacacctcccgccggcatgaacagacagaaactgattttatcaaacagcggaaagatgaaaaaaatcagcaacggggcggaaaaaacggcgcttctttgccttccgtcctattccgcccgggcatcagatagagagtagtccgcgtttttaacggcctttccgccattttccgtgcacccaccgcgaacaggaagggtgcacggatttttttatatttattcttccggaacgaagcgccctgttttcagggaaaattttacacatgatcatcctatcaccatacaaacaaaccgacaaggccggcgctcatgagtgagacaaggataccggaaaggattaaatagcctgcatttttcgaaatatggttgacggtggccttgtccgacaaatctttaaacgcgccgatcaccatccccagcgtcgagaagttcgcaaaagaaatcaggaacgtgcaaaggacggcgcggaaatgcggtgcgaacgtattgacttttggcgcaatttcacccattacgacaaattcattggtaaccagctttgtccccatatattgtgccatatggaaagcctggtctgccggcagcccgagcaaaaagctgaacgggaacaagatgatgcccaaaatcgattccagtgtcagccaaggggctatgagcatcagaagtttgtcaatcaatgcggcaagtgcgacaaaagcgataacagaagcggcaatgatcaaaatcaatttgcccgctgccagaatggagtcgccaaggaaagaaaagaaaggttctttttcttctcttttgacttccaccactttatcttcatccggatctatctttacagggttcaggatgttgaccacaataatggcgttgataatattgagcggaattgcagagagcacaaactgtcccggcaccatttgtgtataggccccgacaatagccgcggtaatgcagctcatcgacatcatcgccagcgttaaattccgctccgggctgttctttttaatttgcaggctggaaaccgccaacgcttccgtattgcccagaaacatcatttcaacagaaaaaaacgactcgaatttcggctggccggtaattttggacaaaatccatccgagtttgccgataatccaaggcaatacattgaaataagttaaaatgtcaaataaaggaacgacgagcaggatcggaagcaacgcactgacgaaaaagtccatttgtttgacatgcacccagctggaaaatgcaaacccgatgccgtcgtaagccgtctgcacgagccagttaaaaccgtatgctgccccatgcaccatggcgcgccctaccggaaaacggattaaaaaccaggccaggaaaatattgagaataaccatcacggaaatggatttccaatgaatattctttctatcctttgacaataaataagcgacgccaataaataccaaaatgccaacgatgttgagaagcaaatatccgaacatggcacagaccttctttccattaagataaacaaaacatttatgaagctttcagcatgtcccttgtacgcttccggttacatctgaaacttcaaatgtaaccggaaaaaaatcatacaaaaacatggtggctgtgttctgtttcacaaagtgaatataacactgaattgaacaattataaacgcaaacataaaattattttcaaagattaaattttcagtttacaggaaagggaagaaaaaccaggaagggcaatagattccgggaaaaagaagagccggccgataaaccggccggcaacattttttgcttactttacagcagcatctaaagcaacgcggatcatgtcattgaatgtagtctggcgttcttcggccgttgtcgcttcccctgttaacaggtggtcgctgaccgttaaaattgccagtgcttttctgccatatttggctgccagcgtgtaaagggctgcagtttccatttctacggccaaaatgccgtattgtgcccatttttcgtggtcagcgtagtcatcatagaataaatctgcactgaacacattgccggctttcaaattcaatcctttttccacgccgctttcgtatgcgcttttcagcaagtcaaaatttgccagcggtgcgtaatccattgcaccgaaaattttccggttgatttgggagtcggtcgatgcccccatggctagaatgacatcgcggattttgacatctttttgaatgccgccgcatgtcccgacacgaattaaattttgcacaccgtaatccttcatcagttccgtgatataaatcgaaatggaaggaatgcccatgcctgtgccttggaccgatacttttttgcctttatacgttcccgtaaatccgaacatatttctcacttcgttatagcataccgcgttctcaaggaaattttccgcaatatacttcgccctgagcgggtctcccggcaacaggatcgtgtcagcaatctcgccttgttttgcgccaatatgtgtgctcattttatgatgctcctttactgaaattgtcatccgtaaaaatggccggatgcagcatgcctgaattgttgaaaaaggtgaaaagatagtcaaaccaagatgcatcttgaattctagtgccaatataacacgcccgaaaaattttgtaaacgcggacatgaaaataatttcacaaacccgattgccaaatgaaaagaagaatggttaaaataaaggcagaaagggctgctgcatgtttgcatgccaagccatgctgccgcgctgcacgattttccaaaaaaattttacacaaagcgccattttcgtgtcaggccggggaggggaacctgatgaagaaagaaatggagaaaagcaagttaagcattgaagtggcagagctctattatcaattgaactacagccagcaagagatatctgaacatttgaaaatatcacgcccgacggtttccagattgctgcaatacgcgagagaaaaaggatatgtgcaaattaaaattgcggaccctttcgtggatttgcagcaactcgagcagcagctggccgaaaaataccgcctgaaagaggcgtgtgtcgcgttttcacctgcatcagatccggcaaccattctgcattatgtgagcatccgggcggccgagtatttaagcgggttgatccgaaacggtatgagtatcggcatcagctggggatcgaccatctatgaggtcgcggcaaaacttccgaaaatgcatgtaaaaggggcagaagtggtacagttaaaaggcgggacgagtttctcgcatgtaaacacgtacgcatgggaaacgttaatgcttttcggcaatgccctgcagacgctccctgtctattttccgtcgccgctgttgtttgaaaaggcggaagccatggaaatcgtcatgcaagatcaatccatccaaaaaattatagagaaaggcagggaagcccaggcagccatttttacggtcggggctgcagatgaagaggccttgctgtttaagctcggttattttaccgaagcagaaaaagaaaaactgatggaaaaagcggtcggggatgtgtgctcacggtttatagaccgaaatggaaagatatgcgacacgtcgattgacaggcggacggtgagtattgaacttgcggaactgcgcaaaaaagaatggtccatcctcgttgcgggcggcaggcggaaagtccttcctgcccatacggcacttacagccggctatgcaaatgtattgattaccgatcaacataccgccaaacaattgctgggcatggaacagggataaagtaggggttccggtaaaagaagaaaacaggcatgcggtttcctgcattgtgatagccaagcaacatagtgcaatacaaatgccgggataaaaggtccgcggaaaacgggtgtgctgattggctggattttccagattgccggcttgcaataaagccaatcctgaatggacgccacgcacgaaaaaacaggcgcccccaatatcgctgtgtcccagatattgacaaagaaaaaacagagggctatgatgggggcgaaaggaagcgattacagcaggtaaaaatatttaccgcgttttccgggtcttccttgctgcctgccggccaaccgttttttcaagtaaacctttcaatgtggctgtcattctgttttcacaacggggtgcctgagtagtaccagcaaatgaggcaagtgagttttcaaaccatgttttggcataaaggagagaacaatgatggcagaaaaatttaaaagagtatcgattattgtactggattcggtcggaattggagaagcgcccgatgcagaaaagtacggcgatgaagggtgcgacacactcggccatattgccgaaaaaatgaacgggctcaacgtcccgaatatggcagcgatgggattgtccaatatccgtccagaaaatccgctcgttggggtgccggttcaggagcatccgaaagctttcttcaccaaaatgcaggaaatttctgcagggaaagacagcatggacggacactgggaaatgatgggccttcctgtcacaagcccgctgcacacgtttccggaaggtttcccggatgaattgataaaaaaaatcgaggatttcagcggccgcaaagtgctttggaacaaaccggcaagcggcacggaaatcattaagcagttcggtgaaagacaaatggagacaggggagctgattgtgtatacttccggggattctgttctccagattgcggcccatgaagaaatcatcccgcttgaagaattgtacaaaatctgcgaatatgtgcgggggctgacgattgatgagccttaccggatcgggcgcgtcattgcaaggccgtatgtcggaacgtccgccgataattttacaagaacatccaaccggaaagattttacactggaaccaccggaagaaactgtgatggattttatcaaagacagcgggctggattccatcgccatcggcaaaatcaacgacatattcagcggtcacgggattacaaaaggattccacacggaaagcaatatggacggcatggataaattagtggacgaactgaaaaaaccgttccacggcctctgttttacaaaccttgtcgactttgacgcgaaatacggccaccgccgtgatccgatccgttacggacaagcgattgaagcgtttgacaaacggctggatgaagtgctgccggaactgtcggaagaagatttactgattattacagctgaccacggaaacgacccggcgtttaaaggaacggaccatacacgggaattcgtgccgctgcttgtctactccccgcgttttaaagaaggccgcgcccttcctgtaaggcagacgtttgccgatctcggcgcaacggtcgcagagaacttcggtgtccgcgcgcccaaaatcgggaccagctttttgaacgaactatgctgaaaagaaaggtgacgagccatgcggatgatcgatattattgagaaaaaacggaacggcaaagaactggcaacagaagaaatcaacttttttgtgaaggggtatacagaaggcaccattcccgattatcaggcaagcgccctggctatggccatctatttccaggatatgtcagaccgtgaaatcgcggatctgaccatggcgatggttcattccggggaaacgcttgatctgtccgccatccacggcatcaaagtggacaaacattcaaccggcggtgtcggtgacacaacaacgcttgtcctggcccctcttgtcgcagcactcggcgtcccggtagcgaaaatgtcgggccggggcttggggcacacaggcggtaccattgacaaactggaatccattcaagggtttcatgttgaaattacgacagaccagtttattgatttggtgaaccgggaaaaagtcgcgattatcggacaaaccgccgagctggcccccgctgataaaaagctgtacgcactcagggatgtcactgcgacggtggactccattccgctgattgcaagttcaatcatgagcaaaaaaattgctgcgggtgcagatgccattgttttagatgtcacaacaggcgccggcgcttttatgaaaaatgaagaagatgccatccgcctcgctgaaacaatggtccggatcggcaaccatgtcggccgcaaaaccatggccgtgatttccgatatgtcccagccgctcggatatgccatcgggaatgccctcgaggtaaaagaagccatcgatacgctaaaaggagaaggccctgacgatttgacggaactggtgcttgcgctcggcagccagatggtggtgcttgccggaaaagcaacgacattggaagaagcaaggaacatgctgaaagaagccatcgcaagcggcgccggccttgcaaagttcaaaaaatttgtcgccaatcagggcggggatccttctgtgattgaccatccggaaaaactgccgcaagcgaaatatgcgatcgatcttccggcaataacttccgggtacgtttcccaaatggttgcggaccagatcggggttgcggcgatgatgctgggggcaggacgcgctacgaaagaagacaaaattgattttgcagtcgggatcgttttgcggaaaaaagtaggcgaccgggtagaagccggagaaccgctcgccacgatttatgcaaaccgggaagcagtcgaagacgtgaaggaaaaaatatacgacaatatcaccatttccgatcacttcgaggaaccgaaactgatccataagatcattacagaataatatatcctattgaaaggggaaattttatggcgaaccttgcagcgtatatcgaccatactttattgaaaccggaagcaaccgaaaaagacattttaaaattaacagcagaagccgcacaatatcattttgcatctgtctgcattcatccttactgggtgaaattggctgccagagagctggctggaacaggcgtgaaagtctgtaccgtcatcggtttcccgcttggcgccacaacgacggagacaaaagcctttgaaacgaaaaaagcaatcggggacggcgcggatgaaattgatatggtcatcaatatcggcgcattgaaaagcggcaatacagaagccgtggaagcggatatccgtgcggtcgtggaagcggcacaaggaaaattggtcaaggtcattattgagacctgcttattgacaaacgaagaaaaagaattggcttgcaggctgtctgtcaaggctggcgcccattttgtcaaaacgtcaaccggattttcaacagggggtgccacggtagaggatgtaaaactcatgcggcaaacagtcggggacaaagccggcgtcaaagcttcgggcggaatccatacaaaagcagaagcggaagccatgattgaagccggcgcgacaagaatcggggccagctctggcgtgaaaattgtgagcgaatcgtaagcgggggttcgcccgttttggctgtcgggccggtgtaaatcttaagcgattaagaaagggagtgcgagacatggatgttgaaaaatgggtcaaagatgccattgaaatccggaaagccgcctatgttccttattcccactttgaggtcggtgcctgccttgttacaaaaagcgggaaggaatatttaggatgcaatattgaaaatgcatcatacggattatccaactgtgcggaaagaacggctatttttaaagctgtatccgaaggggaaagggaatttcaatacatggtcatcgccggcgatacggatgaacccattgtgccatgcggggcatgccgccaagtgatgagcgaattttgcgggaaagatatgccggtcctgcttgtcaacacaaaaggcgacaggcggctaaccactgtcggagaactcctccccggcgcattttccaaagacgatatgtaagccaaaaacaggcagcaaacatgtttgctgcctgtttttgtgcggcgatatgcgggaccagcatgcgcttatatgcagcggattcctgcaattatttggaatgcataaagatcattcgtacggttttaccgtttaaaatggcatttcgaacgattttccctcgaaaataatcaccaacgtattcgccgaatccaatttttccttgcattcaggcaccagcctgtatacaataagaaacataacttcagtatttttcataacttcggtatttttccataacttcataacagaaccccttatacagggtcacgaacaaggaggagaacgatgtcaaaagtaaaaagttccaacttaggttaccctagaattggagaaaaaagggagtggaaacaggcgctcgagcaattttggtcaaaaaagctttctgaagaagcgtttttaaaacgggtaaaggaattgcgcttgagttatttggaaaagcaaaaaaatagcgggatcgatctgattcctatcggtgattttagcttatatgaccatattctcgatacttcagttcttttcggccttatccctgaacggtttcaccatcaaaacggcgctgtcagcttagatacatattttagtatagcccgcggcaattctgacgcggttgcttccgagatgacaaaatggtttaataccaattaccattacatcgtcccggaaataaacgccggcactcaaccttatattactgaaaatcgtttgctcaatctttatcttgaagcgaagcaagagctggatattgacggaaagccggttattgtgggccccgttaccttgttaaaactatcaaaagggtttgaaaagaaggacttcccgaatcttttgcgctcccttatcccgctttatatcgaagtctttgctgatcttcaaagagcgggagcaacatggattcaagtcgatgaacccattctttcgacaacgcttgacaaggaagagcttggctgctttaaagaaacgtacgaagcttttcatcaagctgttcccaatttgaatattttacttcaaacatactttgaatctattgatcattatcaggacgtaacggccctccctgtccaagggattggccttgattttgtatatgatggcggcgcaaatcttgaatcacttaaaaaatacggttttccggaagataaagtgcttgccgccggaatggtagatggccgaaatatttggcgcaccgatctggatgaagcattacatcaagtaaatgatctcctccattttgtggatcaggaacggctttggattcagccatcctgcagtttacagcatgttcccgtcacggtccgccaagaaaacgggctggagcctgttttaaaaaatgcgatcagctttgcagatgaaaaactgaaagaagtcgtggcacttgtaaaaggcgtgaatgaagggcgcgatgccattcttgaagaaataaaagaaagcaaagaagcgatacaggcattaaaccgctcatcacatcgaaacattgattcggttaaagaggaaattcaatcgcttggaaatagcatgccagcacggccgttgccattttccaagcggcaggccatacaagaaaagaagtggcaactgccgcttctgccgacgacaaccattggcagcctgccgcaaaccaaagagatccgctcagccaggcaaaaatggcgcaagggtgaatggacggaaagccagtatgcgcaatttattcagcaaaatatcgcaaaatggattaaaattcaggaagacctcggcatcgatgtgctcgtccatggtgaattcgaacggaatgacatggtcgaatactttggcgaaaaacttcgcggcttcgcttttacccgttttgcctgggttcaatcctatggttccagatgtgtcaagccgccgattatttttggcgatgtggacctggaatcgccaatgaccgtaaaagaaagcacctatgcccaaagtctgacaacccggccggtcaaaggcatgctcaccggccctgttacgatttataattggtcattcgttcgaaatgatatcagtcaatttgatgtcttcaaacagattgcgcttgccttgaaaaaagaaattcatgcccttgaggaaaatgatattcggatgattcaagtagatgaacccgcgattcgcgaagggttaccattaaaagaggagaaaaaaggaaagtatcttcatgatgctgtttatgctttccgcttggcaaccagctatgtggatcatagcacccaaatccatacacatatgtgctattcggaatttgatgaaatcattgatgccatcgaccaactggatgctgatgtgatctcaatcgaggcttccagaagccatggggaaatcatttccacttttgaagaccatgagtatgacaaagggatcggcctcggtgtctatgacattcacagccccagaataccaagtgtggaggaaatcaagacgagcattgaacgtgcgcttcgcgtgattgaccctaaattattctggatcaatcctgactgcggcctgaaaacaagaaaaccggaagaaacgattcctgcgcttaaaaatcttgtccaagcgacgaaagaagtcagggaaaaacatttacagctcaagtaaaagctaaaggatatgggcttcaatcgggctcatatccttttttaacgccttcgtgaggaaaccgtgcctttataatgcccccgggaatggcgatatttgtggccattaactgccgaagccgaatatttgtgccgcacccaatttttgtctctctgaaacgagctagcaagcaatcctataatgaaggaatttgaggtttgcacaaaaagagtcccttatgacattcatatgatgggttcaactgtggcgggcgttaatacacccggtctccgttaaaaatggaactttttacaacgacatagtccactttccgaatgtccgccagtttgttaccgccggcataggaaatggcagattgcaagtcctcttccatttctttcagcgtatcctgaagcggacctctgtattccacgtacatttttttcccttcgacgtttttgcgttcccctttttgaaactccgatgccgaaccgaaatactctttgtaaagttttccgtccatttcaatcgtttcacccggggattcttcgtgcccggcgaaaagggagccgatcattaccattgtcgccccgaaccggaccgatttggcaatatcgccgtgcgtgcggattccgccgtccgcaataatcggtttgcttgccgcctttgcacaccagcgcaatgccgccagttgccagccccctgttccgaacccggttttaatttttgtaatgcatactttccccggcccgatcccgacttttgtggcgtctgccccggcatgttccaattcccggacggcttcaggcgtgccgacatttccggcaatgacaaacgtttccggcaagtgctttttgatatgatggatcatatcaatcacggcattcgaatggccatgggcaatgtcaattgttatatactccggcactaggtttctagcggccagttcttcgataaacgcatattcttccggcttgacgcctgtgctgatagaagcataaagcccgcgctccttcatctccttcacaaacgaaagccgtttttccggctgaaaacggtgcataatgtaaaaatatccgttttccgcaaggtagactgcgattttttcatcaatgatggtttgcatattggccggcacaacaggcaatctgaatttacgcccgcccaattccacactcgtatcacattccgaccggctgtttacaatgcatttttccggaatcagctgaatatcttcataatcaaacactgtatccatggttttacacccctaaaaacgaatattatttgaatataactcaataaacgttcgtacattggtactttacctgatttttttacaattgtcaaaggttttcatgaaagtgcaccatccaccccgatgccggcggccagcacgaatcttaaaaaaatataataatacttgacatgtcggaatagtggaattaaaatgaatttaacctttcaaacgggaaaccacatctgacgggtacagatgtggaaagacaattgaaatattttgaagccggccggtcaaccgaaggctcctcactttgtgaaaaagatgaggggccttttttgcggccttatacccactaaataaatcggaatgataggaaaggagacggtgcccatgtgtacctcctacataatgctataaaacaggaaaggagagagggaaatgttaaaaaaaggaaagcggctggtgccggtctatttgctgctgatcacagccatttttttactcattagcggatgcagcaccgcaaaagaggatgcagcggcggcaaaaccgggcgcaaaaagcggcaaagtggtccggattggctatcagaaattcgggaccttaaacattttaaaagcgaaagggacacttgaaaaagcactgaaaccgctcggctattccgtaaaatggacggagtttcccggcggcccgcagcttttggaagcgctgaatgcggggagcctggactttggccacacgggggaagcgccgcctatttttgcccaggcggcaggggcgccgctcgtatattttgccaattcggtcagcaatccaaaaggggaagccatcattgtcccgaaaaattccaacattcacagcctcaaagatttaaaaggaaagaaaatcgcattgaacaaaggctcgaatgtccactatttgcttgtacgggcattggagaaagccggcatttcctacagcagcatccatccggtttttctggcgcccgccgatgcgcgcactgcatttgaaaaaggggatgtcgatgcgtgggtgatctgggatccgtttttggctgatgcacagctggcaacgaaagcccgcaccatagtggacggcaccagccttgtcgagaaccgggagtttttcctggcagcaaagccgtttgcacaaaaccatgcggacgttctccaagtgatttttaaacaacttgagaaaacagacctatgggtggagaaaaatccaaagcaggcggctgaattcctggcgccgcagattggaatagataaaaaatcattggaactggcgctcagccgcaaacagtttggcgttgaaaaaatcacagcgcaaacgattaagggccagcagcaaatcgtaaatgaattttacaaactgaagttaattccgaaaccaatcaaagtgaaagaagcatttttatccaaatgaagggggaataaaggatgaacgtattttggtttataccgacacatggcgattcgcgctacctgggggtaacaaccggcgggcgggccgtcacattcaactatttaaagcaagtggcacaggctgtcgatcacctcggctacaccggggctttgctcccaaccggaagatcttgcgaagatgcatgggtgacggcctcgagcctgattccggttacttcaaaaatgaagtttctcgttgcggtccggcccgggatcatgtctccatcgcaggcagcgagaatggccgcaacatttgaccggttttctgaagggcggctgctcatcaatgttgtcaccgggggggatccggttgaactggcgggggacggtctccatctcagccaccgcgaacgttatgaactgaccgatgaatttctgacaatctggcggaacttgctcgaaaacagggaagccgattttacaggcaaatatttaaacgtaaaagggagcaaactgctctacccgacggtgcagcagccttatccgccgctttatttcggcgggtcgtcggaaatcgggcaggaagtggcggcaaaacatgtcgatgtctatttgacctggggcgagccgccggaaaaagtaaaggaaaaaatcagccatgtcaaaaaactggcgtcagcacaaggaaggacagtgcgtttcggcatccggctccatgtcattgtcagggaaacggaaaaagcggcgtgggatgctgccaatgacttgatccggtatgtggatgatgaactcatccaagcgtcccaaaagattttctcacggtttgactcggtcggccagcaacggatgacatccctgcacaacggcagacgggaccatcttgaaatcagcccgaacctttgggccggcgtcgggctcgtgcgcggcggggcgggaacggcgcttgtaggcagcccggaaattgtcgcagaaagaatgaaggaatatgcagaacttggcattgaaacgttcattttatccggttatccgcatcttgaagaagcgtaccggacggctgagctgttgttcccgtacctgccgcttgagcagcctgatgcccccgcttccaatatcatcagcccgttcggcgagattgtggcgaacgatgcactgccgaaagtattaaagtaaggaggccggtctgatgttgaaaaaacgcgtcatgccatgggtggtgccggttttcctgctgtttgcctggcagcttgcaagttcggccggcattttgccatccaatgtgctcccaagccctgttgccgttgtaaaagcggcttggagcctcacacaatccgggcagcttttcgattatatcgccgccagcgcaaaacgggcactggtcggatttttggttggcggcggaatcggatttgggctcgggctgtttaccgggctgtccaaaagagcggagggcctgctcgacagtaccgtgcagatggtccggaacgttccccatctcgccctgattccgattgttattttatggttcgggatcggggaagaggcgaagctgtttctcgtcgcgctcggcaccttttttccaatctatttaaatacgtttcatggcatccgttcggtggacagagcgctgattgaaatggggggcgtttacgggctgaaagggccggcgcttttttggcatatgatcctgccgggggcgcttccttccattttggtcggtgtgcgctatgcgctcggggtcacatgggtaaccctaattgtggccgaaacgattgcatccaactccggtattggctatatggccatgaacgcccgcgagttcatgcagcttgacgttgtcgttttgagcattgtcttatatgcccttcttggaaaattttccgactggctggcaaaaatcgcggaacaacgattgttaaagtggcacccgtcatatcaaaaataaaggaggaggaaacgatgacgaataaggtgtttgctgtggaaattgaggggctggaaaaatcattcggcagccatcgcgtcctgcgtcatcttcatttgaaaataaggaaaggggaatttgttgcgattgtcggaaggagcggatgcggcaaaagtacgctcctcaggctgctttcagggcttgaagcggcaagcggcggaaaaattcttataaacggggcgcctttatccggcataaatagatcggcgaaaatgatgtttcaggacggccgcctgctcccgtggaaaaccgtgcttcaaaatgtcagcctgggccttgcaggagactggaagcatgcggcctgtgaaatgcttagaaaggtcggactggaagggcgtgcggatgattggccttcatccttatccggcgggcagaaacaaagggtggcgctggcgagggcattaatccatgagccggacatccttctcctcgatgaaccgcttggggcgcttgatgctttaacccggattgaaatgcatgcgctgatccagtctctttggctcgaaaaacattttacagccatattggtgacgcatgacgtggaagaagcagtcgccctcgccgatcgggtagtgttaatcgaagaaggggaaattgcgatggactgcccggtaaaactcccttatccgcggaaaagggaccacgccctctttgcagcaacggccaatcatattttaaaccgcattttagggagcggccacccggttttgcatgcaatgaaaaattaaggaagaaatgggggattcatatggcggaaaaagtggtactgctgaacgggagcccttctgcgtatacgagattaaatggcatccgtgattatatcagggccgggttaagggggcacgggtacgaaccggagctcatcaatatccgggaacttccggccggcgatttaatgcatgcccggcaaagcccgcccatcaccggggcattaagaaaagtggaagaaggcgatacgataatcattttgacaccggtctataaagcgtcttattccggattgctcaagacatttctggatcttttgccacaaaatggcttatccggcaagcaggtgctgccgctcgccatgggcggtacattcggccacttgctcgcgctcgattacgccctgaaaccggtcttggcttcgctcgggacaacttgcattgaaaaaggggtgttcattctcgaccaacaagtgaaaaaaaaggatgggttttatgaactcgaccggcaagcggctggccgcctgaatgctgctttaaaaacagcatttccgcaaatttccataccgctgtactcttaaacaaatccggcatttggacgatatccaaatgccggcattcgtgtagcacgaacaacgggaaaagagataaccggaatgccggcgcccgtcatcccatcttttgtttgggaagtgccgcttttttcttttccagtgcaaaccggactttctcggttgtttcgatctgtgtgatgtttccttcatggatcgaaatgaccactgttccaaactccagtttttgcaatgattccataatgcgggctactttcgtttcatcaatatgagccatttttcataccccccaaaataaatttcgtgtgtgcgtggtggtccggccggcaatgcggatgatccaaaaaagaaaggcccccttcaagaaaagttaagaagagggcgcggctccttaacttatcttccaagcttggcgcttgctggaattagcacagtattcccaaaaagaatctgttgctgaggtttcctcgggccagtccctccccctctcttgataagctgtatagaaataatttgttaaaactatgataaataatattattccgatttgtcaacttatatttttggtatttcggctgcttttcgggcaaaaccgcttcggatagggtatgataatagaaaaagtgtgttaagggtgtgagattgtgccagagacagatgtatccaagtttgagaagaaaatcgaggtgcggaacatccgcttcgaagacattgatgatattatggcattgtcgaaaaaatgttttccggggatggagccgtggaaacacgagcagctggaaagccatatccggatttttccggaagggcagttttgcgtggaatacgaagggaaaatcgtcggttcctgctccagcttaattgtcaatttcgatgaatacgaagaccagcatacatgggatacgatcactgcgaacggctacattaccaaccataatccgcacgggctcaacctgtacggcattgaagtgatgatcgacccggaataccggcgcatgaagttcgggcaccgtttgtatgaggcacggaaagagctttgccggaaaatgaaccttcaaagcatcatcattggcggccgcattccgaattacagcaaatataaagacaaaatgaccccgcgcgaatacgtggaagaagtcgagatgcacaatatttatgacccggttctctccttccagctgcttgaagggttccagattatgcggatcaacaggcagtatttgccggatgatacagcatccgcttcatttgcaacgcttatggaatggcataacgtagattatttgccgaagtcccgccgtgtctatcatgcttcgttcccggtcaggattacagcgatccaatatatgatgaaaaaaattgattccttcgatgattttgttagacaggtagaatattatgtcgatgtggccgcggatttcggttctgatttcgccgtttttccggaaattttcaccacgcagttgatgtcctacctggaagaaaaacgccctgaccaggcagtgcgccggctttccgggtacacagaccaatatattgaactgtttacagagcttgccgtacgctacaatgtcaacattatcggcgggtcccattttgtggaagaagacgggggcatttacaatgtcgcttttttgttccggcgcgacgggacgattgagaggcagaccaaactccatattacgccaaatgagcggaaatggtgggggatcgcggaaggaaacgaactcaatgtatttgatacggattgcgggaaaattgcgattctgatttgctatgatatcgagtttccggagctggcccgtgtcgctgtcgaccacggtgcgaacattatttttgtcccgttttgcacggacgaccgccaggcctatttgcgcgtccgctactgcgcgcaggcgcgggccattgaaaaccaggtgtacacctgtattgcgggaacagtcggcaacctgacccacgtggaaaacatggatatccagtatgcccagtccgggatcttttccccctccgatttcggctttgcccgggacggcattgtcggagaatgcgatcccaatgtcgataccgttgttgtcggcgatgtcgatcttgagaaactgcgccgcaaccgcaacagcggctccgtccggcaactggccgaccggagaagggatttgtatcagattaagatcaacaccaggtcctgagcatgacggactggacgcaagaccggccgggcagccgccaagtgcctgaacggctgcttggaaaacccggataccgcatcaaaaaaccgcttagaggatggaagctctaagcggtttttcatgattcaggcgatcttcagcacgaccatcaggctggtcatcaacacaatgctgatcaaaatggacaacgagttcaacgtgctggacatggcgacattgccgccgcatttctgggtaaatgccgtgcagacggcggaaatcggcgcaaacgcgataatcacgagcacgagccgaacttcaagcggcagcggcagcaggaaataaaagaatgctgcaaacaggatggccattccgtaacggatgataacggcttttaagatgcctgaaacctggcttttttcaagccggagttcaaaaccgatcccgatcatcagcatggccagaaagccgtttgcctgcccgacgattccggtaaatgcagtcacgcctgtcggcaatgtaatatgcaaaagcgacagcacgagcatgatcagataggtatccatcgggatggatgaaaacatttttttcaggtaagatgccgcatttgttctttcgttgttggcaacggcggaagcaatcgaatatgtgccgcccgtgcataaaaccgaattgccggcatcgaacaggcaagttgccactacgccaacgggccccaggaaattttgtacataggggagtgtaaaacagccaatattataaccggaataattgatcatgttaaaggctttttccgtatgggtacggcgccaggaaacgatatagccggttgcaatcatcactagattgcaaaagacgccgattgcaacaagcattaacagcgaagtttcaagggagagtttttcaaaatttgtaatcacggcgcatggcaatgtaatgtttaaaaccatgcgggaaaccagctgaaaatcatccggcttaaaaaatccaatccgcttcaaaatgtaaccgagcacaatgatcaaaataaacgaagcggctttcgtcaacacaacacccacatttttcccagctttctttttgatctaatttcattaaaaaacaatgagaaagaaacggcaaggaaaatttttggcaacaactttttttcgggtaatgtgccggttcttttttttccttaaaataaggatggaaaaagacttttggattcaggcatgggagcgggcgattaaaaaggatttgtaaattcaatttgtgaaaactatataaagtgttgatcttgcatggctattgtgatcccggcaacgcatataaaaagtcctctttggcgatgtgaaggatctcgaaacggggatccggaccaaaccaagaggaccattttttgagaatctttttgtaagaagagggacttgcggctattcatgtgagcagagaaaaacgggaaatttacttttttaagaattcaacatctgcccttgtgtcaagcaaatcacgattgaggacagttctgaagagtaaattgcccccggatctctccttttcaccactttaagctgttaggatacaagactagcgtgtatacagtcatgcgtccctccccttcgccgatgaatccaatacagacaacgcattggctgagattctccatgaggctggaaaaatatgtaaccccggcactcttaaagaaagctttacccatactgaagttcaaaaaaatccggcagtttattaacaagcgtacgctgcctgactagaaacgttttatcatgaaaatccgacttacctaagatagggcttactgaataagcaaaatgcctagatttagcaaggttgcctacagctttggcaaccatttaaatgctagagttttataacaaatccagtgaaaagcttgcactcgaaagccaattcaacggatggagaagataaaatcacccattttnnnnnnnnnnnnnnnnnnnnnnnnnnnnnnnnnnnnnnnnnnnnnnnnnnnnnnnnnnnnnnnnnnnnnnnnnnnnnnnnnnnnnnnnnnnnnnnnnnnntttttactcctcagagctggattgaggatatccagttttttgtcaatttttctgacctgttctttaatttctttttggccttcttctaaagacgccgttctcgtttccagtgcctccattctgctttccagctcactcatccgttcggacagatttttttccacggatttaatttggtccgatagttcatggatggcctgcaaaatcacattctggtcaattcctttatccactttttcacctccctcatacgacaaattatacgatattttttgccatgggtctatggaaaacaaatgcctggaaaattcggtttcaggctgcatggcgcatcgtatgaatagtactccggcattgaaaacgcatgcgatacaaaaataaatgaacttctcatgtccatattctctgtatttttcaatggcaggctgtttctgtggggagtgagtttcaaccaacgataatgaagaaattgagtgatcgttttcgaaaaaacaattttctcatcgaattttctaaagatgaattcacccgtatcagaagaaagagaacctccatcatttgataaattattttgacgattgaaatttagcgttatttgtggtaaagtagccgaatatatgaatcctttctgatggttatttcgtggatgttttaaccttatcagaaatggattctttttgtatttatttgatacatggccagtttagctgaataccttgatagatatgggatttggtgttatcaaggaaattctgtgaatcattctaggaaaaaccacaacaattaaaaagcatacgcatttttacacagattggagttgcagcagtctatggagaaccaaaaaaagacggtgcagggcagtgtgaagtttgcccagcagcacctggcaaatgagaggacatttcttgcatggatccgcacagccatttccattattggggttggttttttaacgacttccttgcacttcaccataaggatcgcctccagtccatatattaatacactcgccatccttttgggcattttcgcatgtgtgatcggatttatcactggaattacggcggcgttgcagtacgcaaggaaaagaagagagatcgagaagggtatttttgttccggcaaatttttctgttcattttcttaccattatcttcactgtactcatttttatgatttttgtgtacctcatgtctttgctggttatgtaatgttgttgttctgagtataattcatggtggttcctccttggatatcaattgcttcgaagctttgcacaccttgaaccatatcagcggggttttttgtgcaaacctcaaatttctttcattacaggaatgctctaattgatttctttgatacctttttcaatcagaaaaattattgctgcgtctgtttttgcttttgtccaaatatattaatagagggatcggcgtgcgatgctgtttttccgttctcgaaatggattggcaaaggcaggggtgacgtgtttttgtgattttaaaaatttacttgctcaacctgattagtgatctggataatcttcttattattacaaccgtggtccggaaatacggctatgagccaaagcgtctgtttttttatatcgttgtatgtctgacagccagccgtacaatttatgttgcgatgattcagtatttaacagggattccgggattccgcgtcttgtcagggatgattctcctctatattgctttccgttttgtaagttccatccagcctgattccgaggcaaggcccgttccaagcatcccggccgccaaaatgctgttaattgtgcttgcggctgattttctcgtctgtatggacagtgttttgatcacgtccggcatttccgccaatttgctgtacacgatggctggcatggccttaagcttaacgactgtactcgctttcttcgagttcttttctgaaatactggacaaaatttcattggtgcagattgttgccggcggtttgattgcacatgttgcaatcaccggcatctttaaagatccggtaatgaaataccctgtgagcttactggaaaaagtttggggatttcaattaaacgaatggatcaacttcattgcgctggatgccgccatctttttgatattagccgggttcatgataaaggcaagaaacaggacctgaccagattcgccgaaagaagagccggctgccaggatgcgcgaacgtccgggccggcagcacagtttaaaaacagcccgcttccggcagcaaacagctcggcgcgttcgcagcgatatactggattgaagtcccgaaagccggtcttagagtgtcatatagcaatgaaaagcccccctagttcgtgtgaaagattccgctcacgaaccgggggggtttgtttcgttacggagacagccttccttacagagatgggaagttcattcggaataataacaattttaaaaaatgcaaagaattccgctcaatgatttgacattttggctaatgcgttacggatcaaaacaagctaatatgaatttatacaaatcagaaagttcatttaaaggggcaatcagaatgactgaaaaaatccctgccactgaagtgatggtggctgaattgaaggaatgggacaaaaaatatggctcttcgttctttggtatggggaaagataaaatcatagtcggtttgacatggagcctctgcgggcatgattacgaagccaagccgccaattaataaggaaaattggctttcgcacaacagtctatcatgcccgccactccatgtaaaacctccgaagctacttcttcttcccacatgatttagcgaggaagcaaaaatattttattcacccggtgacatcccccaggatccatgcaaaagagaggccgccgattatttgtgggacttttcctatacaccgggtttctgaaacaatgcttcatcgctgccaaagcgagggatttttttgcggattaaatagaaacacaacttttttcctatataaattggttttatcacaactatattcctaaaatggtaaattttctatgagattacagttgaattacgttttcatagaatgattgaaagtagcaatgtatttttttaaaataggatttgtcagtgaaacaaaccatgacccttaatatatagccaatgaaaatttttttaaacatccaggaggttttcgatcttgactcgaaaaaaagtattgtctgttaccgccggcatgacattagcgtctttaattgtaggttctgcatcaacggaagcagctacatacacggtcaaaaaaggagattcgttgtggaagatttcccaacaataccatacaacggtttcccaaattaaaagtgataaccatttgacaggcgatattatttatccgaatcagaaatttaaggtgccgtctaatacaccaaaaaaatataaaattgtatcaggggacacgctttccgccattgcaaaaaaatacggcgttaaagtatcccaattgaaagagtggaaccatttaaactctgatttaatttatgccggagatatcctgaaaattaacagttcttccgctacaaccagcagtactgccaatagtactgccaacagtactgcgaatcgtaacgccaacaacagcactgccaacagcagcgctgcaaataacaccgccaaaagtgctgcggcgcaaagaagcacagcgccaaacggcacatataaaattgtatcaggggacacgctttccggcgttgcgcaaaaattcggcgtgaccgtctcccaattgaaagaatggaaccatttaagctctgattggattgttgccggaagtgctttaaaagtggacggcccatccagtgctgcaagcagctcgaatggaagcaacacgcaatccaatcaatcgtctggcacagcaagcagctcttctaacgcaggaagcgcaagttcacagacaagcggttcgtccagcacggcaagcagttcgtccaacaattcgggcagcacaactgcaaatggttcaaccagcacgcaaagcagttcacaagcgggcagctcacaatctaatcaatcgtccggtactgcaagcagttcgtctaacgccgggagcagctcaaatggaagcagttcatccagctcggcaagcacaagcagctcacaagcaagcggctcaaggtccgtttccaaaaacgttgtatcaagttcaaattcaggctcttacagcggctctgcagtggcacaaattgcacaaaaatatatcggcgcaccataccgtttcggtggcacaacgccagccggatttgactgcagcggttttgtttactatgtacttaaagaggccggcaaatccattggccgtctggatgcagcaggattctacagcaactcctacagagtaagcaacccgcagcccggggatctcattttctttgaaaatacctacaaatccggaatctcggacgtcggtatctatctcggaaacaaccagtttatctctgattcggacaagagcgtctcaatcaaaagcttaagcaacccttactggaactcccatttcaacagcatcaggagactctattaagataaaaaaagccggcagcatgccggctttttgttttaatgttttctgttacagtttacaaagcggaaaatctctaaaaagaattcctattttattactgcaacagtcctgatcgctgtaacaactcctttaatttttctaatttctctttgctaagttggggcttgctgaataagctataaagtgtaaggatttcaaaggaaacatgtaaaaaactataatggacccataaaactagacacgaaatgaggagatgttaaagtaggtttatgagaaaacaatatacgccagaatttacaactcaagtcgtgctagaggtcttaaaagaagaaaaaacgatgaacgaaattgcttctgctcatggaattcatgtaaaccaaatccgccagtgtcgaaacgcttttctttcttgaacagatgcccaaagtctttgaaaaaggcaacaaaaaagttgataaaatgaaagcgggaaacaactggaatgcttatcttttcttgatgcagcgctttacagtccccaattactttagtaaactaaataaagtaattgattccaggaggcgttccgttatggaagatagcaaaatggaccagttccttacgcattggcggtatattaaccggcatctgcgggaagggcggctggcaaatgaagataaaaagattacacgtttacagtggatattgttgcggcatgtcggcaggtccgggcagtgcacgatggggagccttgccgaccatttcaatgtcagcatgagcacggtgtcgcaaatgatcgaccggcttgaaaaatggggatacgcccggcgcgtggcgtcagcccgcgatggccgcgtaaaaatggtgtccctgacagaaaaaggagaagaaatcattaaggaagcaaaaaccgcttatctccagcagctgagcaatggattaagccaattctcagaagcggagcaggaactgtttattggatttctgcagcggcttgctgagaatttaaaagtgtcaaaaggcgatcaccagacggataaaaaggcgtaagcaaaaattgatttccgcaacgttaaaaggtggaatgatccgatgcattttttaaacaagtatgccaaaaagtactggaaactttttagtacggctgttttctttttaatgtgtgaagcactctgcgatttgatgcagccggcgatcctgtcaaaaatcattgatgtcggtgtggcatccggaaatatgccatatgtgttaaagatgggcggcgtgatgttattcatcacagcgtgcggcgcggttgccgcctcattaaggagcacgctcgcaagcatcgtgtcgcaaaactttggggcggaattgcggtcggatttgttccggaaaatccaggcgctttctttccaaagcatcaatcaatttgaccgggcctcactcatcacgcggcttaccaatgacgtcacccaggtacagaactttatcaatggtttaatgcgcatgtttgtcaaagcgccgctattggcaatcggcgccttgatcatggcagtccggctggacccgcagctttctgtggtgctggcagttgttgtgccgattgtcattattttcattataacgaacatgagattgggctttccattgtttatgaaggtgcaaaaagcgctcgaccgcgtgaacggcatcatgagggaatatttatccggtgtccgtgttgtgaaggcttttaaccggtttcaatttgaagtggaaaaattcagcgtggcaaaccgccgcctgcaagaacgctcggcttcttcgatccgaattatgtccatcttcagcccggcgatcttgcttacggtcaatatcggcattgtcgcaattttatggatgggcggcttcggggtggacaatggcacaatgaaagtcggccatattattgcttttatcaattatatgacgcaaatttcaacatcgctgatgatgatctccatggtgtttaacatgtttgtccgggcaagggcctccacttttcggatcggtgaagtatttgccatagaagaaaaaacctccccgaacagattgaaacatgaagtaacgggtgaaaaagggagaattgattttgaaaatgtcactttttcctataccggacaagtgcaggatgcggttttgaaaaatatcacgtttaccatttatccgggtgaaactgttggcattatcggctcaaccggatcgggaaaaagcacaatggtgaatctcattccgcgcttttacgatgttacgggcgggtcccttaaagtagatggtatggatgtccggcattttcatccgcatgatctgcgtgaaaaaattgcgatcgttccgcagaaaaacatcctttttaccggcagcatccgtgaaaatatccaatggggaaatggccgggcgggaatggatgaggtcgaacatgctgcaagactggctgaggcacatgacttcattgcggctgcacctgaaggctatgatacgttaattggccagagcggcgtcaatttttccggcgggcagaagcagcgcatttcgattgcccgcgcattggtgaggcatccggaaattctcattcttgacgatagtacaagtgcggtggatgttgcgactgaaatgcggatcaaggcagcgttaaaaaaatatgcgaaagggctgacttgccttttgattgcccagcgcattacttctgtgatggacacggacaaaattatcgtgttggataagggggaagttgcgggcttgggcacgcatgaggagcttctcagaacctctcaggtttatcaggaaatttaccaatcgcaaatgggtaaggaagtgttgcaggatggccggacaaacgaacggatataagggaaatcaggcaccggggctttttttgcggatgggccgtccgggcgggggaggtgcggcacggttcaggggcccggccgagaaaccaaagcattttaaagggacgttaaaacggctttgggcctattttggcagggaaagaaactggctgtctgtcattcttgcattgattgtggccgactccgtccttacgctgtgcattccctattttatcggcagggccgttgatgccatgccgccgggcagaaaggtcaattttaacctgcttgaaatcatggtttttgttcttacagcggcttatattgcagatgctgccttaacctttttgcaaggctggctgatggccggtgtttcgcaacggattgtgcagcgtttgcgcagccatctgtttcaaaagctgcaaaaactcccggttgctttttttgacgcgaggccccacggtgaactgatgagccgcctgtcgaatgacatagacaacgtgagcaataccatttcccaatcggcgacgcagctcatgtcgggggtcattacccttctcggtactctcatcatgatgatcattttaagcccggttttaacggttgcaagcctgtgtacggttccgctcgtgtttttgctgacgcggacaattgccaagaggacttcagtgctgtttaaaaataaccaggcggaactcggccggctaaacgggcatattgaagaaacaatctcggggattgaggtggtcaaagcttttaaccatgaagaaaaagcaatcaaggcgtttgaagaggtgaaccagtccttgcttaaggtcgggctgagggcgcaaatctggaccgggtttcttatgccgcttatgaacgtgattaacaacttcggctttgccatggttgccgttgtcggcggggttctggctttgaagagcatgattactgtcggcgtaatcgcaagttttctgacgtattcccggcagtttgtgcggccgctcaataacttggcgaatatttttaacgtcctccagtcaggggttgccggggccgaacgggtttttgacatactggatgaaaaagaagagccggaagatgcaaaggatgctgtcgtgctccgggagccaaaaggccatgttgtgtttgaaaatgtgagcttcgggtatcgcgaggatgtgccgattataaaaaatatcagctttgaggcaaagccgggcacgcgtacggcgctggtcgggcctaccggatccggaaaaacgacgattgtgaaccttttgacccggttttacgatgtcacggaaggccggattttcattgacggcacggatattcgtacatatacgcgggatagtctgagaagaagttttggttttgtccttcaggatacgtatttattttcaggcaccatcaaggaaaatatcaaatacgggaatcctgaagcgacggatgaagaagtcgaagaagcggcacggcttgcccatgccgatatttttatcaaccggatgcccgataaatatgaaaccgttttgtcggaaaacggcggcaacttgagccagggacagcgccagcttttggccatcgcaagggtttttctggcaaagccggctttgcttatactggatgaggcaacgagcagcatcgatacacggacagaacggcatatccaggatgcgctcctttcgattatggagggccgcacgagtttcatcatcgcccaccgcctgaatacgatccgcgatgccgatcatattatggtgattgaccacgggcaaatcattgaacaaggcagccatgacgaactaatggcacgccgcggacggtattatcacatgttttacaaccaatttaagaatgtggaagaggggtagaaacacagcctgtttctttacgtaatttgttcaatagaagagacaggcgtggccatttgctgacgaaaatgaccgtgaaaaaaaacggatgttccccccatttcctgaagcgggttcaaaacgcccccaatccggctcaggctgggggcgttttttcaatcatacatcaaatatttttcccgttttttcttccaggcacccaagtccctttgccatttttgggcaatggttttaagggaagtgccgcggttgatatcctgcctgacccagccgtttccaatcagctggtcaaaataagaaatgccgtttttgtcttctgcccggaaagcgaattggccgggatacaggtcatggatcgttttgaccattgcaacgccggtttcaacagactggtaagcattgcggtccgtgacatggatttggatcccgtttgcgagcttgccggtccattttgaggttgttggtgtaaaagacgcgctccggaagcggacgcccggcaaaccgagggcattcaatttctccgctagcaagtccccgtcaatgaacggtgccccgatcaactcaaacgggcgggtcgtacccctgccttccgaaatatttgtcccttcaatgagcgccgcaccaggatagacgatcgccgtttccaatgtcggcatgttcggggacggcatcacccactggagcggggtgccatccgcgtacatatccctgtgccagcctttcatcggcacaactgtgagacctgcgccgattccgcattctttgttaaaatatttggcaagctctcccgctgtcatcccatggcggagcgcgatcgggtacattccgacaaaagaagaataggctggatcaagcaccggcccctcgactttcgcgccgccaatcgggttcgggcggtcgagcacgatgaacgggatgcctttttccttcgctgcttccatcgcataggccattgtgtaaatataagtgtaaaatcttgcgccaacatcctgaatatcaaagacaagcacatcgacatccttcagcatttcaggtgtcggctttttcgtttcgccgtacaaactgtaaaccggaagccccgttttcggatctgtataaaacgggacataggcgccggcgtccgcactgccgcgcaccccgtgttccgggccaaaaagggcggtcaaatgaatatccggattcctggcaaatctgtcgacgatactgtttaatgactggtcgacaccggtcgggtttgtgatcagcccgacccgttttccttttagcaaatggaccttatctttcaaaagaacgtcggcaccgagctgaaaagaatggtgtttttgtttttcatgcggctgattgccccgggccgcatgcaccacggccaggcagctgaaagagatcataagcgccaatatggcagcgagccttttcatccattttccccccttaacggttccgcaaagcccaatcacggcttgtaaaagatactttcgcaatttttccgtgtgagacgatggacggatggagcacataccagccgcggccgttcactgacccgtcggtttcatacacaaagcggatatgtttcgtgccagcagggagcgggatagacatctgccgccagttgccgcttgatccggttaaagcattgccggctttcgtccagtttttcccgtctgttgaaacctccactttcccaaagtctgcgttttgctcgatacggtaccaggtccaaaaacggagaaacgccggccttttcaagtcaacatccgcctccagcacagcttttctattgtcgccgtaaccggcaaaccatgcgccgcgtttatccggaacgttaaccgggatggcgtccgccgcaagccgggcaacagatcgcctgattccgtttgtcgagacagtgtcccgggtcggatgaacgcggttggtcaataaaatgaccgttgtttggtttttcgggctgatcacgatcgatgtgccggtgtagccggtatggcccattgtgtttgtatcggagagcgcatccatgtaccatccctggtttaattcaaagccgggcccgtgatcatcgccgggaaaagcgctgttcatattctgttccatcagccggaccgtttccggttttaaaatccgggcacccgcatatttgccattttgcaaaatcgtttgcgcaaggatagcgaggtcatgtgcggtggaaaaaacgcccgcatgcccggcaacgccatccagcgcccacgcgttttcgtcatgcacctgcccccggatcatccctcttccagtccacggctgaaattccgttgcggcaatgcgcgcctttaacgaagcgggcggattatacatcgtatcgcgcatgccgagaggggcggtaatgtgcgtttttacataagcatccagccgctgcccgctcacaacttcaaccaaaacgcccagcgtaatcatgtttaaatcgctgtacgtgtacgccgttcccgggggattttgcagcccgtgcttcagaacgatttcgagccggtctttgcgggatgttcccattttataaaccgggattcccgcctcaaacccggaagtatgcgtcaacagctggcggatggtcacgttctcctttccgttttccgcgaatacaggaatatattttgcgacagggtcatcaagcgcaaatttccgcttttcaaacagctgcatggctgcaatggatgtaaacaatttgctgatcgaagcaatgtcgtaaatggtgtttgtttttgcaaggaccggggcagatgcttctgtaaactggttgtctgtataacggtatgcatatccgtatgcctgttcttttgcgatcgtgcctttccttgcgacaagcacaacagcgcccggcatggctttttgcgcaatcgcgtcatttaccgctctgtcaatgtctgtgagcgggccttgggacattccggcagacgcgggcgttcctttatgcagtattgctgagctttttccgggtgcatcccaggaagacgggtggccatgatatccggatgcaaaggcaagagacggaatggccccggctgccaacaaaatgatgcatccaacccataaaacgaattttacccctttgttcttcaagcaagtcccccccttttagtaatgaagaccgtggccgaacggagcgtaccccggaatggtgacaggcaattttccgccggggttgatttcgcctgtgagcgcttttgcagcggattgtacagaaacgctgcggtttccataggccagaagattcgcgtccacatcaggcgcgcccatgatgtcgtaaggattgcccattgaaaccattacaaccggtttgcctgtttttttcagcgctcttaaaaatgcctgttgcgcggtattggtatttgcattgtaagcggcggcgacaatcacgtcggcattttgtgcttttccaactgccgtagctgtttctgcctgtgttggcgcagccgctgtgctcgtattttcggttataaaccctttttctttcagaaggccggcaaggcggctgctgtttgcaacagatgggccggttacgaatatttttttcgtttgattcagcggcaatatttgattttcgtttttaaccattgtgatgctttcgtccgccattttttgtgcggctttcaaatgttcaggggtgccgaaatagcttagcgatttttcagatgtaaacgggttccggacaatgccgcgttcatatttcacccgtaaaattctcgcgacagattcatccaggcgtttccggctgatttctccggtttttactgcatttcgcacagcattccaggccacttccacatcgggcggattgagtaaaatatccgcgcccgcattgaatgctgctaccggtacttggccggggggaaggacgtttgcgccggacatatcgaggctgtcggtcacaatcagcccgtcgtaactcagtttttcacggaggaggccggtcatgatctttttcgaaagcgtcgccggcaggccggaaccatcgagtgccggtacaacaatgtgcgcggtcatgattgcgtcaacgccggaagcaatcgcggccttaaacggttttaaatccacatgatttaatgttttcaagtcgtgatggatgacaggcaggccgtaatgggaatcgacattcgtatccccgtggcccggaaagtgtttgccggtggcggctacattttggctttgaaatcctgcaatttgggcaatgccaagtgatgcgacaaggtccggattttctgaatatgaacggacgccgatcaccgggttggccggatttacattgacatcgagatccggggcaaagtccatattgatgccgagacttttcagttctaccgccatgatctctgcagcctttttcgcgttggctgcagacctggttgctgcgagtgccatattccccgggaaaacggctcccggttcgagtacacgggcaaccgcgccgccttcctggtccgtagaaataaagagcggaatgcggggcttttgttttaacgcaattttctgtagcccgttggataactgctgcacttgtctggcatcaacaggggtgctgatattatccgaccagttgaaatagatgacgccgccaatatggtatttttcgatgatttctttgaagtttgtgccgccacgccctttttcgatattcgtttcggcgtaggcgggatcctccggtgtttttccgtaagcatgaacaatgaacagctgcccgactttttcctcgactgtcatctttttcaattcatgagacacccagcgttcttttgcccttgttctccaatgcccatcctgtttcgcttgtccacggaatccgggcataagcgaaaacaacaacgcaaaacatacgacaaacaatccggatcttttcaaaaacgccatccctcccttttgtaatccctttcatttttagtctaccagcctaaagaagcatgtccatccgtctttttgcttatgttttccaggccgggacggttttaatatagatgttcatgtatccggataaaccgcaccgccggaaaaattgaaaaccagccggaaattttctggatgtgcatgcctgtcatatcgggaacggcgagtgcagcaaatgggggagcgggcacagggatgatggaaatggagagagtagagtagcagctaaagtgaaaaaatgcccggacctctgatataattaggtttgttcagaaaaaccaaccaaaaaggtggggggattttttcttttccaaaatacgagtaaatgttaccaagtgtctcctgtttttctgttgccgaggaatggggtttgcttgaacaattgcatcctttaagcaaaatatttatgtatctgagacaagttggtaaattgctcctgattgttctgtttcggggggctttagatgtttttccgggccacaatacacttttttaacggctttctgaaagaagtctcccatcctcaaggaatgtgaaggtgcgaatcgcaccaatgagtaggtgggagatgaatttcggttggctttagccaaaggttttgatctaaccagtcttagatggaataaaggattgatataccaatgaaattagatagtaataatcattcagtattcttactgcattatcaccttgtattggttgtaaaataccgtagacaagtgttcgatagcgaaatatctgattttgcaaaagatatgttcgctgagattggaagtaaatacaatatttctttagtggaatggaatcatgataaagaccatatccacatcttattcaaagcaaatcctaactctgaactatcaaagttcatcaacgcctataagagtgcaagttctcgactgataaaaagagactttccacatataagaaaaaaactatggaaaaaatgttttggtcaagaagtttctgcctacttacaacaggcggcgctccaatagataccatcaaaaaatatattgaaaatcaaggtcaaaagtgaggtgaatggatatggccaagcaaaacaaagctttcaagtttcgtttgttaccaaacaaagaacaatccgcattattagctaagacatttggttgtgttcgctttgtctacaataagatgttagctgaacgcaaagaaacgtatgaaaagttcaaggatgataaagaattgcttaaaaagcaaaagtttccgactcctgcaaaatataaaagtgaatttccattcctaaaagaagtggattctttagctttggcaaatgcacaaatgaacttacagactgcttataagaatttctttgaaggaaatgcggattttccaaagatataatcctggttgtagcaacggattttcactatttgtcgactggcatggcgcctgtttgtttcaatttcctgctacataagtgagcgtgttttggtttttgaagaaataaaaaaacaggccctctttataaagagcctgtttttatcattttctctacattaagctttttcaacgtttgctgcttgtggcccgcgggatccttgttcaacatcaaaagttactttttgaccttcgtctaaagttttgaagccctcaccttggatagcagagaagtgaacgaatacatcgtctccaccattgcgttcgataaagccgaagcctttttctccgttaaaccatttcactgtaccttgttccatttatattgcctcctggtgtgcaactgcacacaatgtgttactatccttgtccaaggtggtcatcaagatgaaaagtcttatactatgccattctttacaccgaacaaaaataattcttcttaagtatagcgcagaagaaagaagtttacaaccattttgttttgttaaattcatgtaatccatccgcctgcgcattgatggacggcttttaatgaaatcgcttttttgcaaggggcagcacgatttgcaaaaccattgtattttttcaaaacaataaatcaaaatgggtgtgtttttgctataataggcaagtaaaatactcgataggtggggccgttatgaaaatagtatgtaccggatacgggatatttgcgccaaatacgaggaacattgatcagtatttgtttaatttgaaaaacggcgtttgcacattacaagtggcggagggcatggggccaaaaggagaatcaaccattgccgggcttatccaggatgaagaattgaaacaaatagaagcagatgataaactaaagcgcctcccaaaagtaacaaaaatggggaccgctgcagtgaaagaagcaatcgcgtcttccaggctggatgtccggcataaaaaagtaggcttgtttttcggattatcccttggtgctacgggagagaaactgtaccaggattccattcactacgctaatcatgaactgtatcgaaaagtatcgctcatattctcccactatgcgaattaccatagtattacggctgccattggccattatattggggccaggggcgtcgaaaaaacgattacaacaggttgcacttccagtttggaagcagtagaagatgcaatcctttacttgaaaagcggaaaagtggatgcggccattgtcggcggaacggacagcccgatatgcaatgcgacaacttatgcgtttgccaaaacaaaaacgataccgcttaaccaaacgcttgaagaaggcgctgtgccgtttcaaaaaggaagcaaagggtttgcaatgtcggaagcggcaggggcaatcgtgctggagagggaagaagatgccgttcaacgaaaagcggatataaaaggcgaaatcgttgatgtcgtttccaataatgatgggatcaacattttttcattggacggatccggggaccaaatgttaaacgcgttaaaagaagtcacaatgggaagaaaaccggattacatcaacagccaggcacttggcattgaactgaacgaccaaatcgagcagcactgttccaaacagttgtttaaccatgaagttccctatacttcaatcaaaagcatgtatgggaacccttttggcgccattggtattttgcaagtcatttcatcgcttttaagcatgcaatatggctttatcccgccaacgattcggacaacgaggcgcgggtatgaagaaatgaatattgtaacagagaccctctatcgggagattcatgaagtggccatcaccaaccatggatttggcggcaataacgcatgtgcctatatgaagaaatacaccaagagttagaaaggggatgaggtactatcgttatgggggtattgatttttacgataggattcattccgattgtcctggccgtgagtatgcaatcactttataaagagtcaaagctgtctctgatattgggattctatatgcttttgatcacggcctggcaattcgatataggcgtcctttttctcggaaaagtattaagcaaggaaacgatccttgttcttttcaaatttcttcggggcgggacgactttttccataccggttgtctattacattgctttttctatcataaaaggccagccggcacttctggcaggacggaaatggctggacaaactatcgaatgttttactcaataaaaaggttttatattttttgattttctggagtacggttatttattttataaactggacaagtttaggtacaaaaggcttgtatatggcgaataaaaatggggcaaataccctctttttatttcctgaatacgggccgctgatctggctatatattttacatatgggcagcttcttactgtttttaatccttatattcatgatgaccaaaggaatggtaaaccaaaatatcaaaagattcctggccaggtttagcctgtattccctgcttttatacatattcggttttttaaacttttctcctggaaccggtggtatttccagcagtatcggggttatcattttctcaaccttgatcgtcatggagttcataaaattaggcgcaaatataaaggcaaactattatgaaataatggaaaggcagatgaaattggactacaccggcaacttagccggaagtctgattcatgaagtgaaaaatgcgaatcaaatcattaagggcttttcccaaatgttaaatgcaagcgctggtatggataaaaaagataaagcttatttaaatatgatagaaaaaacttctgagcatttagatgacttagtagataactacaagacgtatttgaagtcatcttccaccacttttaagaaagaaaatctggaatcgattatcagggagtctcttgcgttttcccaagtcattttaacagaacatcatattgaagttgaactgaagaattgttatcattcccttgatgcgtacgtaaataaagcaaacttgaaacaagtttttatcaatctcattaaaaacagcatagaggcgattcccgaagatagaaaggacaagagaattgcgatccagattgaagtggaccaggaaatgattatgattcattttaaagataccggcacagggattgggcaggaacaatgggaaagtgtttttaacccttttttgtcattgaaatctgaaggaatgggattaggcttgccttatgtaaaaaagatcgttatagagcatctcggcaatatccggatcgttgaaagttcagcggaaggaacccatttccaaattgagattccacaaaacgggatattaaacatggactagcacttcgcttttggaaaacgggccggagcctgaaatgcgcggcaaccgccaaatctggcgggggatttccatcgtattgccatccaaaacggcgggcaacataaagtgtcccgccgtttttgcacatcaatttttttcctgcttttgccccagcaatgcttattggctgatctgctattcaacaaaaccgttcctttctaaccgtgctttccggatggtttcagcgcacggaacaaaagcgctctcccgctgttgcggaagacctgattgactcaggaatcgtaacggccattccaattccttccaaaccatcttttttactcattatactataccggctgcgacaattttcctatgaaaatgccagtgcggaagatgattcactgacaccgaaacaaacggaatatgcgctgtcactcgtatatcagttgcggggcgaatacgaactcgccatcccgccttctgcattaaccgtaaaagatctgaaccggctgatcgcatacccgaagtttaaaaacaagggaatattggtgaatcttgtaaaaaagggctaatcattacaggcattgacaaatgatccgaaagggccccatcccttcaccccgtaaaaagcaaaccctaaacagcatttactgttacggtgcctgccactccccgtaaaatgccggattaaacgcggcggattgcgggaagtggcaggtattttttcacaaacacttgttgaaaatccttctcatttgtaaatcgtgaaatcatatattaagctaatagtggctgccctcagggagcggccctccatcgcccattgcatttttccaagtacattatggatttgatcgcgggaaaatagcgcgtatctcattttgaagggagggaggttcatttgaagaccagaaagtacgttttatttgccgctttactcttgttcggggtgctgctttttccttccatggcgtttgcgcatgcgtacatcgtaaaatccagcccttctgaaaatgaagtatggaaagcaccgccgaaaaaggtgacaatccaatttgatgagaaaatccagcccgtaaattattccattcaggtatttgatgagaatgggaagcgggtggaccgaaaagacggaaggatcaactcccgcaatggaactattttggaatgcggcttacgcacaaacttgccaaaaggtacatatcaaatccaatggaaagcggtttccggtgacgggcaccctgtccaaggcgttatcccttttcaagttggatccgggcatcaggcgaagcaaccatccactcccggaacggaaacggggtacacaccaaaaatagacttgattttgatccgctggctgcaatatgccagttttgcttgtattgccggtatgcttttcttttctctgctcattgttccgcgggagtacggccacaatcaatatatgaagaaagcggccggcaagatgctgcaaatgggtactttgttcctggtcgtgggcactttattaagcttgcctttaacagcgtccattgaactgacggcttcatggcgccatgtgcttcatgccggcatattaaaaagcttcatcgcgcatacggcttttgggcatatatggctggtacagatggccctgctgctatgcctggctgctttggtatttttccattcgaaaacgaaaaatcctgctttgttttatacagcactcgttcccgcgcttggatgggtgctcaccaaagcgttgattggccatgctgcttcagccccgcatcccgtatggcaggtggcgctggattttctccatttgctttcggcagaaatctggattggcagcctggccatgttcgccgtttttatgccattggaaaggcatgaggatacaaagccgctttacttccggatgatcagagcattttcaaaatggggcattgcccttgtcgttgtgctcgctgtgacaggcgtttcgggcagcattacctatgtgccaaacttgcggtcactcgcaacgacctcttatgggaaagtgctgtctgctaaaatccttttgcttctcgttatggtcatgcttgccgcgttgaatttttggaacggaaggtggagcaggaaaaaagggatttttgcctccgtatggggtgaactggcaacagggcttgccgtgctcgtcctctctgtcattttgacgaacttgccgactgcaatggcggcacccgggccgttcaaagaaaccaaaactgtccatcaacaagaagtgacattttcggccactccgaatgtgataggggaaaatacatttacattgtcgctgaaagaccgcaatggacggccgattgggcacatcgagcaagtgacattaacttttacttcgcttgaaatggaaatgggcagcgagtcgaaagtattgaaaaaagtcaaagacggttactaccgcgcaaaaggtatggatttcaatatggcaggccgctggaatgtgcatgtccacgttttgaaaaaagacttgaataccattgacacggatttctctgttcatgttggcagccagcctgattgagggggaagacggagttcaaaaagcggttccaatgaaaggagaaaatgaagaatgttgaaaaagtttgccagagtcgtgctgccggcatttttcggtttatttctgtttgcaggtgcagcaagtgcccacgtaaccgtgagcccggccacatccacaaccggtgcatgggaaacctatacgattaaagtgccgacagaaaaaaatattccaacgaccaaagtcaccattaaaacaccaaagggcgtcgaaattgaatcgtatgagccggtgccggggtggacctattcggctgaaaaaggatcagacggaaaaaccaagaattttacttttaaggctgatggaaaaggcattttaccgggccagttccagcagtttacaattgttgccgcaaacccggatcatgagaccgaaatcgcctgggacgcgtaccaatattacaaagacggcagcattgtcgagtggacgcaggacaaaaacggcgacaaccctcattcgatcacaaaaatagtgaagggatcggataccggccaagcccaaacccatgatacaacaaccaacagtggcaaaacatccggctcttcatccaacaccctgccgcttatcttgtcaatcgtatcggttgtgctgtcactggttgccttgatcacagcatttcgaaaaaaatgaaaatgtgcgcctgtcaccgcccggggcggcaggcgcttttttcacagattgtaaatggcagaatgccgtaaagcaagaatttcccgctatatatcaaatatttaagtcccgtttccggtaaaacaataagtgcaggcggaaaaggcggcaatcagcaacagtacaaggagagcgttaagggggttatggccgtctccgtttacaatatcctgataagaaaagtatttaaaagggcaaagcacgttgagtgcgtacaggttgtcagccaaatttgtcaattcgttgatggcaaatgttccgaattagacgtaggtattgaaaaacggacgtttgtcctataaaataaaactgaaaaataaggtggtgcagaaaaacctgtgaaactatctgaacgcacctaccgttgttcgtgcggttatgtggcagatcgcgactataattcagcaatcaatatcaaaaatgaaggtatacgcttattagcgttatcataagtaacaaaactcttggaacaagagggttagctcggtcagttttcgttggctagtaaaagcaacgataagtcgagaagcccccacttcaattagaccgcaaggtcaataagtggtgggtagttcactggggtgaaatgatgaaaaatccagtctttttattagcgccggattcgtttaaagagagcatgacggcaaaagaggtatgtgccgcaatggaagcagggattaaaaaagcgatcccggatgctgtttgcattcaggttccaatggcggacggcggggaaggaacggttcaatcgctggtggatgcaacaggcggaacgatttaccagcaaaccgtcacagggccgctcggacatccggtcacagcctgttacgggattctcggagacggggaaacggcagtaattgaaatggcatctgcaagcggcatccatttggtcacaaaagaaacgaaaaatccgttggttaccacaacctatggtaccggagaactgattaaagcctgtctggacaaaaaagtaaaacagattctgatcggcattggcggcagtgccacaaacgacgggggtgccgggatggcacaggcgctcggcgcaaaatttttagatgaaaggggcgggatgcttccttttggcggcggtgcactcggggatttagcggaaattgatttggccggccttgatccgcgcttgaaagaggtgcaaatttttgtcgcatcggatgttaccaatcctttatgcggggaaaacggcgcttctcatgtattcgggccgcaaaaaggcgcgacgaaagaaatggttgcgctcttggataccaacctttcgcattatgccgccatcatcaaagaacagcttggcaaagatgttgctgaggtcccgggggcaggggctgcaggcggcctcggtgccggtctgatggtgttcacggatgccgtgttaaaaagcggcatcgagcttgtcgtggaatacaccggattggagcaaaaagtaaaagatgctgatatcgttttgaccggagaaggcagcatcgatttccagacgcagttcgggaaggccccttatggcgtggcccgggcagcaaaaaaacatgggaaacccgtaattgccgttgccggttatgtcggggaacaaattgatgttttatatgaaaaaggcattgatgcgatctttggcatcctgccccgcccgatggcgcttgaagacgctttgcaaacgggtgctaccaatattgagagaacatgcgagaatatcgcgcggcttttggtgctagcgaaacagtagagggcgtatcatattttcacgaaaataatatttaccgcgtgccggattccttgtctttggaggaagctgcattagttgagcctagcgcggttgctgtacaggctgtgaaagatagtggtttaagatttggcgatacggttgcgatttttggtgcaggcccgatcggattattgaccattgttgcagcacgtgcggcaggtgcaagccggattgtcgtggcagatttgtcgcaacctcgtctggacctggcgaaaaaagcaggcgcgaccgacattattaactccggggaaaaagatgccgtccaaaccatccgtgatcttgttccgggcggcgtagatgtatcctttgaagtggccggcgttgctccgactttcaaacaagcacttgatgcaacgaaagcacgcgggattgtcgatgtcatttctatctttgcacgcccgatagaatggaacccgatgcagttaacgaatacaggtgttagcgttacagcatcgattgtttacacgaagaaaacattccaacaaacgattaacctgattgcatccggccaattgaaaccgcaagacgtcgttaccagccatatccaattggaagaaatcgttgaaaaaggcttcgaagctttgacaaaagacaaatcccaggcgaaaattttggttaaattgagcggggagaaataaaccttttaagaagaggccggcccgggctgattccgggccggcctcttttctttgcaagaggaaatcacaacctttttgcggggcgcataggctaatgtggaaaaccgttaattatccaaacagaggagtggcgggatatggctagaaaagtgttgcattattttgcaggcggcaataccgggaaagggtttgcgcattatttggattcaagtttgcagggtttggatcgcgtgtttattttaaatggcaggacagggaaatcatacatcatggaaaaactggcggaagcgtggaagaaaaaaggttatgatcttgaactgattcattgcccgtctgcccctgattcgctggatggcctgatgattccaggattaaaaacaggagtggtggatgggaatgcgccgtatgcgattgaaccgaaagcaaatggatcggttatgatcctggaggacgcattggacgccaaatatgaaaaagaggtattacagctgaatcgccgtatacaggaagcctatcaatctgcgtacaaatcgtttgcggaaagtttgcgccatcatgatgacttggaggccatttacttaaaagaaatggattttgaaaaggcaggccaggtgacacagcagctgattgaaaagctatttggcgggaaaaccgggggcgagagcgcaacggtataccaccgttttctcggggcagccacaccaaacggagcagttgactttatcccaaatctgacggaggggctatcgaaacgctattttataaaggggcgggccggaaccggcaaatccacaatgctgaaaaaaattgcggccaaagcgtcagaaaaaggattcacgactgagatttaccattgcggatttgatccaaacagccttgatatggtcatcgtcagggaactcgggttttgcatttttgacagcaccgatccgcacgaatatttccctgagcgaaatggggacgaagtgatagatatgtacgcggctgcggtgacgccgggtacggatgaaaaatacgcaaacgaaattcaagctgcccataagcggtacaaagacaaaatgaaagaagggaccgcctggctgcacgaggcaaaagtgctgaacgataaactggaaatgtactatgatgaggcactggacttcgcaaaagcggaccagatctatctcaagatcaatcaaggtatccaggaagctgaacgcctgcaaacgcaatcgtgataaaatgggatgccgccgggaaatgcggcatttttttgaggaaatgtaaggcattgcggggtttttcgggaaggcccgtgtttttcaaagtagattctcatgcccagtgaacgcggcaccagcagaagaatgaaaatcagcctgtgcaattttccaggatagtaaggaaaggcatcacgcgattccccaggtaccgatttgcctccataaggcaacacatgattccccacggggctatcgtcttgttgaaaaacattacggtttcccggtttccagcgtaaaagggaaaaagaaaggcccgaatcgttttccggagacgctccccctttcgtattgaaatccaaaacacactatggtaggatactatatgtagttagttgtctcagaaatcaatactaaatatagtattttgggtgagggtggcagatctgtctgaaagggaatccagtttaaatccgggctgcctacaaaactgttcggctgtattgcccatcagaagggccagaagcacaagccaggcctgccataacttgatgtttcggagggcggaatttttgccgttttggccgccgtttattccgcgattgaacgggttggtcgggcaaggatgttgcggaaattttaagccgctacgccgcagccttttttcattgaaaatgcatgatgtgccacctattttttcatgcccaaaaccggtgcgttagaaaggagaaccagtaaaatgatgacaaaaaatgaacaagaaaccagtggcggttttcccctgcatgccttaaatgagattgtgttttcccataatcatgatttaatgcaagaaaatgcaaatatggatggctcttcaccaatggggcaaatgtcaaaaatctcttctgaagtcagcaaaagttatgcaaagcaaatgttgcttagcaaagaggtcgtaaaggcgattgatgacaattttatttacccccatgaccttgattttatggtaacgggtacgaccacatgttgccagattccgctgggcggggtattaaagggcggatttaataccggacatgggtatatgcgtgaaccgaaagacattggcagcgcgatggctttagcagcgattattttccaagccaatcaaaatatgcagcatggcgggcaaagttttccgatgtttgattatgatcttgctccttacatagagaaaaccttccataaaaatagaaaacgtttgaaaacctatgccaccagctatacagacgaagagcttgaggcattagcctgggaagaaaccgaccgggatgcgtaccaggcatgtgaagcttttatccataattgcaattcgatgcattcccgcgggggagggcaggtcccgtttgtatctattaattacggtaccgatacgtccaaagccgggcgattgctcgtaaaaaatatgttgttggcaacgaaagccgggctcgggaaaggggagacaccgatttttcccattcaaatttttaaaatgaaaaaagggatcaattttgaacccggggaaccaaattatgacttataccaattagcacttgaaacgacggcaaaacgtttatttccgaactttagctttatagattccacgtttaatcgtccctattatgacggcacgccggaatcagaaattgcgtatatgggctgccgcacccgtgtgatggcaaaccgccatggaaaagaaaatagtatccgccgcgggaatttgtcctttacttctattaatcttgtaaaaatagcgctgattgctaaaaatgaatgtgaattttttaacatactagatcgttatcttcaccttgccattcaacaattgttagaacggtttcattttcaggcaaaaaagcaggcgaaacattttccttttttgtacggggaaaatatttggcaggatagcgaaaatttaaacccggatgatgaagtaggagaagtattaaaacatggcacattaagtgttggttttattgggctggctgaagcactggttgcactgacaggcaaacatcatggggagtctaatgattcttatcaattagggtatcgtatcattcagcatatgcgggagaaagtggacaaagcaagtgagacttatgatttaaacttttccttaattgcaacgccggcagaagggttatcagggaagtttacgcgaaatgaccaaaaagagtttggaaaaattcccggggtgacggaccggtcctattatacgaactcattccatattccggtttattatcaaatcaaggcgattgataaaataaaaattgaaggttcttttcataaattatgtaatggcggccacatcacttatattgagtgtgatggggatgtttcaaaaaatgtccgtgctttggatcgattggtaaaagccatggcgcaatatgatattggctatggtgccatcaatcatcccgtcgaccagtgcggcgtctgcggttattcgggaatcattgataatgagtgcccggtttgccataatgccgatgaaggtaggattgggcgcattagacgaataaccggttacctggttggcgatatgaaaaggtggaattcagccaaacgtgcagaagagagcgaaagggtgaaacatcaatgagggtcatgaatatcatccacgattcggttgttgacggtgaaggtttgcgaaccgtgatcttttttgcaggctgtccgcacttttgcaagggatgccataatccgcggagttggaatatccataatgggacagagatgccggttgaagatgtcgttgcagaagtggccggcaatccattaacagatgtaaccttttccggcggagaacccttttttcaagcgcaagaagtgtgcgaagtggcaaaacgattaaaagcactggggaaaaacatttgggtttactcaggctatacatttgaacaattaatcgcttccgatgatccctgtaaacgggaattgctgcgatattgtgatgtgctcgttgatggcccgttcctattggcagagcgggatttaaccttatcattccgcgggagcagaaaccagcggatcattgatttaacaacaaagcggggaatggaaagatcattttaatcaaaggcaaaagtggagagatggttgcccatctctccacttttgccggtgtataatctagcttgttcggatgaatcataggatggaagatttctttataaactatatcatccgttatcttcttcatcatttttcgcggcgcatctttagcaaggctggtcgcgctgcggatgcgggattttccgaatacagatgcttggttgaccaacttggcaacgggttcagagtacatgaacgacaacctgtattttattgagaagcgggttggcttcatttctcactttatcctgcaactgttgaacaatttgcttggctggtcggcatgatgaaaaggcccgatttccccctgaaagcagcccctatatgatcaaggtaaaactgatcatttccaaatatgcttcacatacaatggagaactaccttgccctgtcatgatcactgaaccggtttaggaaggcggagtagtagtttaaagacgcctaaatgtcaggtataatagattgtgaagattttcaattcgcacttaattgggatggcaaaggagtgaaaattggcagtttccgtattttgcgtacgattcatttatcattggagggagggcatcagatgaaaaaattttttgcttttcaagttatgattggcttgattttaggggccataataggggcaattttccctgatttcgggacgaagttgaggccggtcggggatatgtttattcacctgatcaaaatgattgtcattccgattgtgtttacaacaattgtcgtgggggcttccggcggaaacgggaatatgaaaaagatgggttcgttggggctgaagacgctcatttggtttgagctggttacgacgcttattttgggcatcggcctgctgcttgtgaatctcttaaaacccggtgttggagtggatctatcgcatctggccaaaacagatatttcacaagtaaaagcaaacgcgtccacagtggttgattttaaaacgatgattgtcaacatcattccaaacaatattgtgaatgcaatggaccaaaataatttactggctgttattttctttgccattctattcggggtggcagccggtgcaatcgggaaagcagccgagccggcattgaaatttatggaatcggcttcgaaggtgatgtttaaattgacacagatggtcatggttaccgcgccgatcggtgtttttgccctgatggcgtcttccgtcggccagtttggcatcagtcttttcattccgatggccaaactgatcggggttgtctatcttggactggccatcgtcatattcggcctgttcccgctgattgcctggatgttcaaaattccttattttaaagtatttcggatggtttgggacttatttctgatcactttttcaacgacaagcacagaaacagtccttccgcagcttatggagcggatggaaaaattcggatgttccaaacgtgttgtctcgttcgttattcctgccgggctatcgttaaattgcgacggctccacattgtacctgtcagttgcttctatttttattgcccaggcattcggtataccgatgagccttgaacagcagctgattgtcatggcggttttgatcgcgacttcaaaaggcattgcagctgttccaatgggttccctcgttgtgcttctggctacggcaacagccgtcggactgcctgctgaaggtgtggctattattgccgggattgaccgggtgctggatatggcacgcacggcttgcaatacaccgggccactgccttgccagtattgttgtttccaaatgggaaaaagagttccatccaaatgaagcattcgctgcccgcccggaaacacaatcggttcgccagtcataagaaaagagtcgggcatattataaaaaaaggatacgattggtttcgtatcctttttggggttgaaaatgtttctttacatagacgcccatgccggaacgggcgcggcaccggcatccaaaataaagtccggcggcaaggcttgcgagccaacttttttggcagaaaatgggcaatcggaaaaatgatgtttttctccaggctgtgtttctggcatgggcggcagccgcatatgaaatccgtataaaaagattgatcaggaaccgtttattcgctgctcctgcttcgtcagcacgtccaccaacttttgctgtaaaggcgttaaaatgtgattggaccggtaggcaagggaaatgaggaattccggctggccggggtcagcgagcgacaatgctatgacaggggcgtattccgggacggcaatttctgtaaaaaagctgatgccgacattttcagcaatcacaaccatgcctttaatgatttgaatatcatttgtccggtaaataaccggcggatgggtccgggtcttttttgagagcccttcaaaagccaatgggtgaataaaatggtcgctcagctgaatgaacggttcgtctttcagttcttgaaaagccacggattttctcgtagcaagcgaatgttgcgggctgacaataattttaaattttttgcgggcaagcaaatggctcgttacgtgctcgtcttctatcggatggattgcgcccagcaaggccatatccattttccccgttagcagtttgtgaaacagcgattgtgaaccatcctcgtacacattcatattctgcagcagattctctttggcgagcatggaggaaatggccgggaaataatagttccctataatcggcggcaagccaatggagaccttttccatttttaatgcctggatttccttccgggcaatatccagttctttcagcatctgggtggcatgcctttcaaattgccggccgctttctgtaaaacgtatctcgtgatgggactggtccctgatgatcagctgcgtaccaagctctttttcaagccgctggatagcagcggtaattgccggctggctgacatggaaaaaattggccacttttgtatatcgcttttcctgatacagctttttatagtattgtaaatccttgatgttcataaaaaatctcacgtccattaaaaaaattcacattgtgttcaaaaaagggtatccccgcgttccccgttctgtgcaaacggccccggtgtttgttaagcgcttcacatggcacaggtacaggatttccgtaaaaacatactttcctcatataaatatttttttcttaaattgcaatattaaatgcaacaagtattgaaagaccagataacccatgattagagaccttgccaaaatgctatatcccctgaaactgtaagcagtcagacaattaaaggtcgttgatttattccactaaagaaaaaagacgtttgtaggaacattatgacaaatgtaaaaagaaattgtgagttttttttgattttaatggggtaaatttatttattataagtgtctaaatttttacactttggtcggttttgggcgggtttcaatagattaagctactcattcctgtggtaaatattgtaaaacggaaaaagatgatttttttttgaaaaaaaagagccatgaaagccactcctttgtcaagatataagtacgaccaaannnnnnnnnnnnnnnnnnnnnnnnnnnnnnnnnnnnnnnnnnnnnnnnnnnnnnnnnnnnnnnnnnnnnnnnnnnnnnnnnnnnnnnnnnnnnnnnnnnntatcagtggacataaaatggaacttagaggatctgatcgggaaaaggggcaatatatttacacttgtcctgtatttcatccaaatgccaagcaagaaggtctcacctgcccgctagcgaatcacgcggaatgttgtaatggggcagcacaaggaagagtatttaggatagactttgatcaaacgcctcaagtagatgtcgagttgccgcaacatgggcgcacatttgaagtgttatatagtgccagaacgatcatcgaacgaatctttggcattctaaaagacggatacagtctccgtcgtgttcacaagcgtgggaaacaggcagttgaagctcatgtagatcgatgcatgatatctatgcatatcatggcaaatatggcgtaccatcagacaggaaaggccaattgtggatggacacgcaatcggctgcaaagagcaaattaagttattcacaggtggatatgtgaataacttaaatgaacgttttctttccataaagggtagtgagaaaaaccattttgtgaaggcgggatacgtatgcccttttttgaagaaaaatgaccgttttacttctattgaattaaaaatctggatgtaaattgaaaatctggatgaaaaggcaaaaaaaatcgggataattaattttccagagcctcgctcaagggtatatttttattttggcagaggctctctgtaaaagcttcacttgaaatcgaaggcttaaaagtaacaaaagaaattgaggatctagtcattgcaaaagcagcaggagagatttcttttgaacagtttaaacgtgaagcagttaggttggcagggaaacagtgaatcggtatgctgcccttgacctctgtttcaatactgtcttttaaccaaaaaaaataatccacccttgagtttataggccacgggtggattattctgcctaaagccgatcccccttgaagatcgtatccgtattatacacgattacaattgtatcacgaaatcgataaaaatattctgaaatatctgatattttatcgtggtagaaaaatgcaagagcataaggaatttttgcccccaccgaaggtgtgggatcaggcagtgcctgataaaacgatgggtacaaaaaaagacgattcgcccacaaatatcccattaaaatcccacgtttagcccactaaaatcccacaaatagtccacgcttgtcccacatttagtccactaatatatccccgtaatctcatcactatatactgttccgaaactttttaacagaatgaaatatccctatcattcaaataaatgtttgactatcaaaaggaaagggggtacaatatattcaaatgaacatttgaatataaagaggtgacattaatgagcaccaaagacacttgcgaaatttattgttatgacgaagaaaaagtgaatcgaatacaaggcgaattagctaaacacgatataagtagtgttgccctattatttaaagccattgcagatgaaaacagaacaaaaatcgttttttcactttgtcaggatgacgaattgtgtgtgtgtgatgttgccaacattattggttcttctgtcgcaacagcttctcatcatttacggactcttcataaacaaggaatagtgaaatatcgaaaagaaggaaaaatggcattttattcactggaagatgaacatattaaacaattaatcacgattgctttagcccataagaaagaagtgaaagtgaatgtctaatcaacaaaccttaccatctgaacaagaaatgaaaacctatcgcgttcaaggattatcttgtacaaattgtgcagccaaatttgaaaataacgtgaaaaatttagaaggtgtaaaggacgcaaaagtaaattttggagcatccaaaattacagtttatggtgaaacaacgattgaagaattagaaaaagcaggggcctttgagaatttaaagattcaggatgaaaaagaacaaaggatagagtataagcctttttggaaggaaaaagaaaatattaaggtttatatttcggctgcattgctcattattagttggtttctaggaaggcaatttggtgaaaataatattatccctacgattggatatgctgcatcgattttaataggtggatattccttatttattgaaggccttagaaatttaagtaaatttaaattcgatatggatacgctcatgacgatcgccataataggagccgcgttgattggacaatggggtgaaggagcaaccgttgtgatccttttcgccattagcgaagccttagagcgttattcaatggataaagctcgtcaatcgattggaatgttgatggatatcgctccaaaagaagcgttaattcgccgtgaaaatgaagaaataatggttcacgtggaggatattcaaatcggtgatattatgatcgtcaagcctgggcaaaaattagcgatggacggaatagttataaagggtacatccacattaaatgaggctgctatcactggagaaagtgttccagtaaccaaaaccattgatgatgaggtctatgctggcacattaaatgaagaaggattattagaagtaaaagtaaccaaacgggttgaagataacacattatcgaaaattattcatttagtagaagaagctcaagcagagaaagcaccttctcaagcatttgttgataaatttgcaaaatattacacaccagctatcatcattttggctacattaattgcgattattccaccgttattattcggaggagattggagttactggatatatgaaggattagctgtattagtggttggttgcccttgtgccttagttgtttcaactccagttgcagtagttactgccataggaaatgcggcaagaaacggtgttttaattaaaggtgggattcatttagaagaagcaggtcacttaaaggttattgcttttgataaaacaggtacacttacaaaaggtattccagcggttacagatattgtgacatttggtggaaatgaaaatgagttgatgacgattacagctgccatcgaaaagggttcccagcatccacttggtacagccattataagaaaagcagaagaaaatggattgaatattaatggagtttcggttgaagagtttcaatccattacaggtaaaggcgtaaaagcgaaagtaaataatgaaatgtattatgtaggaagttcaactctttttgaagaattgcacggtagtatcgaaaacgataaaaaacaaaaaattgaaaagatgcaaacacaagggaaaacggtgatagtgttaggaacggaaaaagaaattctttcgtttattgctgttgctgatgaaataagagaatcatcgaaatccgtgatccgtaaacttcatcaaattggaattgaaaaaactgttatgcttacaggtgataacaaaagaacagcagaagtcgtcggaaaagaagtaggtgtttctgatattaaggccgatttgctaccagaagataaattaaatttcattaaagaacttcgagggaaaaatcaaggtgtcgcaatggtcggtgatggtgtgaacgatgcacctgctcttgcagcttcaactgttggtgttgcgatgggaggagctggaaccgatacagcattagaaacagctgatattgcgttaatgtctgatgatttaagtaaattgccatataccatcaaattaagtcgtaaggctttatctatcatcaaacaaaacattacattctctttagcaattaaattagtagcattgttgttagtaatccccggttggttaacgctttggatagcgatattttccgatatgggagcaacattacttgtaacgctaaacagtttaaggttattgaaggttaaagaatgatgaataacaaggaaaaagaccatcttacctaaggtggtctttttatttcgttcaatgtatgaatttgtataaaaacatacattcattttcgcttattctcttgtcttttccctttttcttcgataggattgagacatcctacaaaatcgtacattcaaatcgttgatttttaaagggaaggagaaaagatgacgacacctgtttattgcaaaattaaagtgcagagatgtgcaaaatttctatgcaaatggttatgcagaggggctttacatggaggggtagccatgataacctgtttgggtttgccaaatctgttacagctggccgcttggcaaaagaatcatggctgcagaggctccatgtcaagcccttaatagcgagaattcagattgaatttttatgcggtataaacgaatttatatactgcaatactctgcacttttttcttgcaaaaaacaacaccaaaaaatgtgcagccaatccgtagtcagcagcaattagacgatatgaaatgggcgttaaaacgccactgtttgccccgagattacattttatttgtgttagggtgtgaaacaggcctacgggttggagacctgcttaaaatcaaaactgaagcgattctgaggctgaaaaacaaaaaagagaaggttttacgagtaaaagaaggaaaaacccaaaaaatccgcgatatttatattggccattgttttgaggaagtgtatgaatacgcagctggattagacagtgagtggctctttccatccaggaaaggaaaccggccgattacaccgacacaggcttatcgccagctgaaaaaggcggctgattttgccggagtagagcatgttggtaatcatacgctcagaaaaacatttggctattggttttataaagccacgaaggatattgccacgttgcaagagattttgaaccattctcatccttctgttactctccgttatatcgggatcacagaagaagaaactcaaaatgtcttgaaacattttagcgtgtttcaggataaataaaaattcggactgtacaaaatgacagtccaaaaattttactccgaatagcttgtagctattcttttttatttctacgaatctgatcgcaaatcttatttcagtttgctagtctcgaaggcatacatctcctgcgcgcacccaccattattaggctgcaatgttgaaaaaattgtcaaaaacacaaaaatattgtaaaataatataaatttttcaataattggcattatcttattattatcaccatacacacggttggtaaaaaaggggggaagcttaatgattaaaattagttcacttttggatcaagaaaaaatcaaagagggaatggaaaaaggtattctaaaggaatggatgattaccacctattctgattttcgaaactcgttacttgatgattctgctccatatccttgttattttgcagtagaagcagaaaaaaatgggcttattcgttatatatttgctgaatcggcttacgatacgcatgaattattaaatattagagacggagtttatgaatacataaaaagctacaaatctataggtaaaagaacgacactagttatcttttttaaaccttcagaaaatgaattgcgagcagaagactataaaaaacaattttggaatgttgttaaatttttgaatgaaaatgatccggaaccttggccttccgaaattccaaaagatccaaatcatcctgaatgggagttttgttttggaggagaacccatctttttagtttgccgggcgccgttttattcggataggaaaagtagatttactgctaatggtcttgaaattacgatgcaacctcgtggtacacttgacgatattacggctgatacgaaattgggtcaacagtcttgtccatcgaaaaaccatatttagactctttgatatagttttccagacaggctctctgattataaaatctccaaatatccataggttcccagtccatcgttgtcacaatggcttcataatcccagagaaaatcaaacaattgaagctggtcttcctcatacttgtcagcttttcggatgaccgcaactcttcttggcttttcccaggaagttgcttggtagtagactgtttttccctctataacaatcagctcatcatcaacataccggatccacggagaattgtcgttttcaacatactttttcaatcttgatgtccatttcagtttgccggcgtagttaatcttctgctgctcccaataactgtaaaacttttctccgccaaatcccttgtcaaaacgggcgtaccggataaggtactgagcggagagcaatcgataggtttcctcggcaaattcaattccgttgtcagctgaatggacgttttccggtcttagcacaccgtttaagcaaagatgggattttccttcaaaaacgagaagggggtggtagctttttctgcccggcttatgggggttcaccccgattttcgctccctcctggtttccataaaccgtttcgacacttgaatcaaagtcaagaatgagatcggaatccagctatggttcgatgatgtccatcacccgttctttgaattctatggcagcatcctcgattttctccaaccttaatagatccttgcttaaaagcgtataatgcgggcattttcctcctaagaaagcacgaatcaaagggtcattctggagtgattgaaaatgaaacatacgggagcaatctgccatccagcccgcaatcagatatacaaatattttacttagaggaatttgccattgtctttctttaagcaatcaaacccccggaaagtctgctggattttcatccgttccagaaattgcagaaatgggaggatgccactaaattttgtactattctttaaattgaattcatatttaattcttgagacaggaatgatataattcaccttaaaggtgccccctttcttggttattgtttttttctcaaaatcaattataccaaaggatggggcacttttttattttaaattactattttactttcgtaatctgggattaaatatttgcgatatgccggtcgggactttgcggagaatgtcgcaaatcattggcaaacagccgaaagatttggatgtgcgctatttcgggctgaaccatttcggctggtggacgagtattaaagataaagaaggccatgaatatttgccggagatccgcgattatgtcgcgaaacatggttatttgacccaggttgaagtggatacccagcatatggaccaaagctggcaggaaacgcacaaaaaagcgaaagatcttttggcggtcgatccgagatttttaccgaatacgtacttgaaatattacttttacccggattatgtggtggaacattctgatatccattacacgcgggcaaacgaagttatcgacggaagggaaaaagaggtgttctccactgctcaaagaatcgttgaaaaagggaccgctgaaaaggaatctttttctgccggcagccatgcgacatttatcgtcgatcttgcccgtgcgattgcctacaatacgcatgaaagaatggtcatgattgtggaaaataacggcgcaatcgcaaactttgatgatgatgcgatggtggaagtcccgtgcattgtcggcacggacggcccggaaccgctgacccagggcagaatcccggaatttgaacgggcgctgatgtaccagcaggtcaccgtggaaaaactggtcgtgcaggcttatgtcgaaggcagctatcaaaaattgtggcaggcgctgaccctttcaaaaaccgtgccaagcgcaaaagtcgcaaaagcattgctggatgatttaatcgaagccaacaaggaatattggccggaattgcattaattggccttgcaggtttaaaagaaggcagcagcggaaagtgcctctttttaaaaacgaaccgggtacttgaggcaaccaaaatactgccgagaatgaataaagggccgtgaaacatatacatttaaggcggctgtcaagcgggacggcaggcgttggttttctcaaaaacggtccggagtgcgaaggttgaatgaggtataccggccggaattgaaataatggaaggggcgaaaaggaatgcgggcttttcgcctttttcatgaagcgtggagattcgaggattggtgctaactggttaaaagacccccggaacaaggcaaatgatttcaaacagcagctcattttcatacgggtattccgggtgatgcaggaccaccatttttttccttgttatgttaaagtaagggtattcaaaaaatacgggagggaagcatatgtttaaacttttttcaaaaaaagctgtagtggaagaacttgttgcgccaatgagcgggaaggttgttcaaatagaagatgtgccggatgaggtgttcagccggaagatgatcggggatggcatagccattgaaccggatgaaggcgttgtggtctcaccggtggacggggaaattgtccagttcttcccaacgaagcatgcggttgggctggagacaaagagcggcttggaaatattgattcatatcggcatggatactgttgctttgaacggggaagggttcgaaggctttgttcaacagggggatcgtgtaaaagcaggtgataaactggtcacctttaacctcgaacaaatcagggaacgtgcggaaagtatcatttcccctatcgtcatcaccaatttcgatgccgtggatacgctaaccaaaaccgctgaaacatcggcaaaacgcggtgaatcggtgttattgacggtgaaaatgaaatagctttcctgcagatggaaaatgggaagacacacgcccatctaaatgcacggatacatttggaacgatgtcttcccatttctttacgctatttcaatgcatgaacaaaatcagcgtaacattacgggcgggatgccgaaacttcccgcttttttattgttatgcctgcagcagttcctcaatctttgcctccagctcttccggttttgtccgtgagccgtaatagccgatgacatggccgtgccgatcgacgagaaatttattaaaattccatgtaatttttttctcccctgcctgctcgagcaattcggcaaacagcgggttcatttctttccccttcattttactttttttaaacaacgggaatgttacgccatagttggcttggcaaaatgctgcaattttttcgctttcgtcaaactcctgtttcatgaaactgtcgctcggaaagccaagcacggcaaaccccttgtctttgtacttttcgtaaaggtgctccagcccctcatactggggtgtaaatccgcatttgcttgccgtattgacaataagcagcacctggtttttatatttggccaaagactctttctcttctccagtaagccgttcaaaagaatagtcgtaaatggacatcatcagtctccttttccccggaaattttatttcttgtcattatcgtaaagtgaatgtggggacatgtcaaatgatgggctggtgatgtatgtgtcaagtttttctcgacaaggtttaaatatcgggtattccaagacactctttttgtacactttcggctaccgtgctttacttgctcggtgtaattttcggaaaagatgtaatatttccgtataaagatggataacggggannnnnnnnnnnnnnnnnnnnnnnnnnnnnnnnnnnnnnnnnnnnnnnnnnnnnnnnnnnnnnnnnnnnnnnnnnnnnnnnnnnnnnnnnnnnnnnnnnnntaaaattttacacatacgctggtgatatcacggcctggttttgtggctctgttgtttgggcggacaccaactgttcaaggtgtgaaagtaaatgagtggagtaggaaaaaattgcaaaaaatgatttatttcagactggataaatattaaaataggtgtatgaagatacacactcatattttttaagggggggatgatggtgcccgttttttgatcaacagcaaatgaagatgccattttaacaaacagcgggttggcagtattagctgtcagagacagatggagttttaattgcagggagaaaagtgagcacatgaatatttttagctacattgttttagggctttccctctcagtgccagttggccccattacgattgaaatggttaagagggggatcaagaaaggctttttgcattcctggtttgtcggcttgggcgggatgtccgccgatgttgttttaatgtttttgatttatttcggtgtatctacatatttaactacaccagttgcgaagctgatgatgtggattttcgggtgtatcattcttgtatacttaggctatgagagcattagagatgcttttagagaaatcaccataccagaggagaaaaagaaaggaaatttgctgcaatcttttctgtcaggctttttgattgcgatctctaatccactgaatattatattttggattggcatttatgggtcggttttaaccacaattttaaatacggtaaattcgggaaaagctttactttacagcagcgcgatttttattgggatagctgcctgggatataacggtagcttcttccgttcactttggaagaaaatttgttcatcagcgttttttaaaatggctgtctgtcattgccgggattgccttaattggatttggcatacatttcgggtatcaagccgtgaaaagtttgtatttagtaggcatcggccacgaataaccaggtggtttaggatgctacatgaagtcatcgcgcttacggccatacaaaaggcttttttcttttttagaaaaaagtagccgcttccgcaatgccccatctttcgcatatttgctttttcaattctcatactaaaggcgaaggagggatgatcatgccaaaacggaagcacgatgccgaacaaaagaacaaagaaggctttgactcagccaaaaccgattccgagtattcaagggaattgcagcagctgggcgatggggcaggcagcgcggcagccaaccgcatgcacaaagaaaaagcaaaaaagatgaaatcctccaaaaaccagggagaatggaaaggaatgcattgaaaacgggtcttcactctttaagagtgagggcttttttgcggtggcgggtcttgcgttaccttggtacatttgtacattgaaagcagtgacaaattggcaacgggaatgcctgaatccagtttatggagccaaatgacgcataatggatatggattaaaaaacggctacaagaaagtttaaagacgatcgaagaaaaaattccttttttgcaaaatgtattccaagaggttcgaatttcggagcaattagatgacgctgctttgtaccagtttgcgacagttgtgaattagtatccaaaaccaaattcagatgattatgccgaaatatttgatgaattgcttgacctgcttgtccacaggtcaggaaagacaggagcggagattataactcctcgagttatcgctaaactgcttccattactgctgaacattcaggaaggcacagtctatgacggaagctttggaaccggtcgcctcttggcatatgcttaccgctatgcaaaagaaaatggttgcaaaataaaactggttggacaggaaataaacgcgagggccaaatgggtatttccggtacaaataaaagacttcatcggtaatggaattaggtgtcattacagcgctgtaagggagatcttatggaggtgtaagatgaaaacttatgatgaaccaagatttttcattggaggaaatccatttttgatataatagaagcatattaagctgtactaataaaaagcacacaacaatcagcttggaagaaaaatgatgatccacagctggcatattaatatggatatacgaataagtttgcacgtcatgtgaggattttttgcaatatatatcaacatgtttcaagaaaaattggatgaatcgatggaatttgatttagacttagacgttgatacagccaatatgtgattcgagaaatataacaaatgggggatatgaattgattacatcagaagagatgaaacgcagattatgggatggggcaaatgaactacgaggttcaatggatgccagccgttacaaagattatatgcttggattaatgttctataagtttttgagcgataagacattagaaacgttcaaagtgaccagtggtattgggcaaatgtctgagtttgaactattggaagaatacacaaaggcaaaagcagagtacggcgaggagctggagaaaatgattcggcacgtactcggttattatgtttcgcctgagtatctctatcagacttggttaaaagacattaaatcaggagattttgaagttcaaaaagtaacggacagcttgaatcactttgagcgtacgattgctgtgtctggtgattcagatgactttcaaggactattctcaagttcaacgcttgatttaacagataccgctttaggcagcaacttaaatgaacgtagcaaaaatattaaggcactgatcttgttatttgcagacctgaacatggtgaaattgcaaaaaggcgatgtacttggagaggcgtatgagtatcttattggccagtttgcgatggagtcagggaagaaagctggggaattctacacgccacgacaggtcagtgaagtcatggcacaaattgtagcaaaaacctcagaaatcaagtcaatttatgacccgactgtaggctctggttcgctacttttaacagttggaaagcacttagatgaagatgctcaaaagaatctgagttattacgggcaagaaaagaacacagcaacctataatctaacccgtatgaatttgttgttgcatggtgttcggccagaaaaaatgaccattaaaaacggagatacactttctcaagactggccagaagatccagaacgtccaaatgaaggcatacaatttgatgcagtagtgatgaacccaccatattctgcgaaaaattggaacagagcagggctgaaagtgagtgatcctcgttttgaagttgctggggtattaccaccggactctaaaggggattttgctttccttttgcatggattattccacttaggtcaaaacggtacaatggcaattgttttgcctcatggggtcctgttccgtggttcggcagagggcgaaattcgcaaacgattgcttcagaaaaattacattgatgccattatcggcttgccaagtaatctatttaccaatacaggtatcccagtcgttgtcatcatattaaagaagaaccgaaaaatcgacgagcctgttctaattattgacgcttctcacagctttattaaagttggcaaacaaaatgtcctgcaggaaaaagacatcgcaaaaattgtggatacatatgttgaacgaagagaagaggaggggtacagtcatctggcgacacgagaggaaatcatgaaaaatgagtataacatgaatattccccgctatatccaggcaaatgaggaagagattccgcacgatgtggatgcgcatctacttggcgggattcctcaaaagaacgttgacgacttgaagattctgcagtcgacagtgccagatgttttgaaacaatcattaaaagaaattcgtgacggctatgtcgaacttttaaagcctgttgaggaaatttctgaggatgtattcaatgacgctcggattattaaaatatcaaaggaaatcgaaagcaaaacaaaagcctatatcgataaatactgggatgttttacgaaatgttgacaaaagcagtagcttgacgcagttaatggacgaaatgctggttgaaatcaagcagatcctttcgtcattcaaatatattgatgtttatgatggctaccaaattgtggcggagatatggaaaaatacactggcacatgatacggaaattattgcgctaagtgatttctatacagcgggacgcacgcgcgagcctaatatggtaacgaaaggatccggaaataaaaaacgtgaagaacaagacggctgggttggcagtattgtaccgaatgagttgattgcgaaacgtttatacagtgatgaactaaaagaaatcgaatcaaagaaaactcgcattcaagagattgaaacggagctttctgatttggttgaggctgcgaaagtggaagagagcgatgaagccaacgctttaggtgaatgcttgaatgaagctggtgaggcttttgaaaacaaattaatcaaagcagcgttaaaaaagacaagcaagggaacggttgaatatagcctactgaaaaatgttgagaaattatttgcggataaatcatcccttaacaaagccgtgaaagcggatgaaaaagcgctcaaggaagctgtacaagaacgtattttaactttgacaaatgatgaaattgacaacttgatgtatgaaaaatggtttggcaacacgctggatgccatagttggtttggtatggaaaccgataaaaaaagagttggatacattgcaaatgctacacaatcgctatgctgataccttgtcagcaattgatgaagaaattcgagactcagaaaaaacattacaagccatgatgagtgaattggtggtggaagaataatggaacaaacaaaattggtgccaaaaagaagatttaaagaatttcaaaacgctcacgcttgggaacagcggaagttgggggaagtaattgagggattatataatgggcaaactccttcaagattcagagatgacttttggaatggcagtattaactggttatcaagtggagatttgaatcgctcgattgttaaaacggcaagtgaaaaaataacggaagctgggcgggctagcgcaaatttgcgagttgttcctaaaaatacctttgttatggctataacaggactagaggctgctggtactcgtgggaactgtggaattcttggaattgatacaacgttgaatcagtcatgtatggcggtttatccaaataaaaatttgctaagtactcagtttttatttcaatggtataggatggtaggagaagaatatggtactagattcacacagggtaccaagcaacaaagttataacgctgaaattataaaagatcttgatatatgcttgccaaaaaaagaagaacaagtcaaaataagtcaattactttcagaactcgacaacctcatcaccctacatcagcgtaagttagaaaagacaaaagcactaaaatctgcctatctttctgaaatgtttcccgctgaaggtgagcgtgtgccaaaacggaggtttgccgggtttacgcaaccttgggaacagcggaagttatcagatataactgatagtattggaactgggaaaagttcgtttattaaacatgaaaaatctgctgataatccctatgccatattaggttctacttctattattggatatgatagtgagtttgatcatgagggagattttattcttactgctcgtgtaggtgcaaacgctggtaatctttatcgttattatggaaaagcgaaaattactgataatactgtatttataaaaggcaaaaacttatctttcttatatccattacttgatcattttgatttgagaaagctttcatttggcactgggcaaccacttgtaaaagcgagtgaattaaaaaatcttcaaatcaaaacgccttcttatgaagaacaaatccaagttggaaactttttcaaccaattagactatctcgtcacccttcaccagcgcaagttagaaaaactacaaaatctaaaaaaagcataccttaatgagatgtttgtataaagggagagaaatcatgagtaatacagcgaaaagtgcggcggagaaaacttttcaagagaattttgtaaaagaactgcaaaaatataaatgggaagcccccgactatctcaacggcaataagcaaaaggtaacggttgcggacttggtttcgcactggcggagtgaacttaaccgcatcaatgctgaccagcttgaaggcgttgaattaacggataatgagttcaaacaagtaatggcaaaggtcaatcaaatcagcaacagctacgaggctgcgaagattttggctattgaaggatcaaaaggcaagatcgatggcatttaccgggatgacaacccaaaaatcacgagaaaacaaatcacgttgacgattttcaaaaaagctgaagtacgtggtggggactcaagctatcggattgcgagagaagtacagacaccaaatgacaaccgttttgatattgtcttattgattaatggcttgccactcatcaacatcgaacaaaaacgcacggacaaaacgctggacgaggcatttggacagtttaaacgctactaccgtgacggggaatacagtcataattttatggctttttcgcagatgatggtcatcacttctgaaattgacactcgctattttgccacacctaaaacaatagaagattttaatcctagtttcgtctttcattgggcagataaagataacaatgtaataaacgattggaaaaaagtaattgaacaatttttgatgattccaatggcacatcagatggttggcgattacttagtcattgatgaagcgagagatgaggaaaacaggcgacatatgttaatgcgtccctatcaggtccatgctctgcaagcggttgaaggagctgcatttggatgggacaatgatgaaaaaatgcctcatggcggttttgtttggcatacgactggttcaggaaaaacgatcacaagtttcaagactgctttgtttttatcgacaagagcaggatttgataaagtcgtcttccttgttgatagacgtgaattggataatcgtaccagtgaaaacttcaaagcatatgctgcctatgagccggtttctgttgatgatacaaaacacacttaccagctaaaaaagaaactgatgtcagcaacgaatggaattgtcgtcacgacaactttcaaactcaatgctttagtgaaggaactggaagcagcacacgatcatcgtttagcagataagaagatggtatttatcattgatgaagcccatcgcacgacgatggggcagatgatgggaacgataaaacgctatttcaagaaaaatggacttttctttggatttaccggtactcctttatttgatgaaaataaggtcaaaggcaagatcaatgaaaaaagcgaagtcatcaatacaactgaaaagttatttggcccgatgttacatcaatatacgattgacgaggcgattgctgataaaaacgtattaggttttcacgttgactatatcaacaccggagaattcaaaagttatgatgatttaagagaccagatcgctgaacaaatgaaggaagaacatcctgaatggacggacagagaaatcgaacgccaagttcaagaaatgtcagaagcggacgttgaaaagcaagcaaaaaaacgagggctgcttgtataccaagacgaaacgcatattccacgggtagtggaagaaattctgaataactgggaatcccaatcacaagaaagagaatttaatgccattttgacggttgcctataaagatcgtgtcattgcttattatcatgaatttaaaaaacaactaaaagaacgtggggaaaagctaaatgtggcgatgacgtttagtttcggtagtgagaatgatcccacgccattagatccccaaattgtcaacgagatgtttaaggattacgctgcatttactggcattgagtttgtagctggtgataaaaaacacggtgaagatgcttattttgaggatcttgtagagcgcgcgacacgaggcggcagtggacgaaacccgaaaaatattgacctcgtcattgtggcagaccaactgttgacaggctatgactcgaaacgtctgaatacgctttatgttgaccgttcgcttgaacttcaaggcctgatccaagcttactcccgtaccaatcgtgtctttggttcagaaaaagagtttggaacgattatcaacttccagtatccccgaataactgaagaaatggtgaatcaggccctgaagctatatggaagcgggggaaagagcagtaaggccattgttgatacttacgaaacggctgtaaagaaattgaaaatcaaagtgtctgaaatgattccgactttacctgatccaactgaatggcaaaatattgaacatgatgagaagaaaaaagaagcatttatccttgcttttaaagatgctgctgagcagttaaatttggtagaacagtactatgaatttaagtggaatgatgatacttttggaattgacgagcacacttggctgcagtatgttggtgcttataaaaacttaacatggaagcccggcaccccacctgtgatatcaaccattcatccacttgctggaaaaacgaaattggcaggaacgcaagtcattgatgcaaaccatattattaaattaattggttcaaaagttacttcaccgtacggcgtgcaaacggtggatcgtgaaacactccgtattatttatgaacaaattcaagagttgagtaatatgggggaccatgagcaagcacagttgttaaaggaatttgtagatacagagctcgtgcccggaaacttgtcgagcaatttgaattttgatgaggcatttgaaatttggaaagcggataagctgcggaatacagtcattcaattttctgcggagtggggcttagatagtgaactacttgcaaaagcagtgaattcatattctatttcgaagcctgatgttgttccttacatcaatgaactcataagtagtgttgattacagcaaagcaaccaatcaaacggctggtaatttgttaaaacataatatgatcctcacgactaaattgccagaatggattgcggagacgaagcagaaatatagctaatttgatgacgggtgcagagtaactgaaaacgaagaataaatagaaacagagtatgtttaactttaccggaaaagaatgcctttgtacattagctattaattccatgtacgcagtttttttgtaagcctgtactattatgaaagtaatatgatcaaaagattagaggggtaatgaaaatgacagtgccagactatcaaacctttatgctaccttttctaaaaatactcggggatagaaatgagcatacgttacaagaaatgtatataaagcttgctgattattttagtctaacagacgcagataaaaaggaatacttgccaagcggaaagcaacttaaatataaaaacagaattggttgggctcgaacttatttgaaaaaggcgggtctactagaacaagttggaagaggaagatttacgatttcagaacaaggattaagtgtcttaaataaaaaccctgagaaaattgatgtaaagttcttagaacgttttaacgagttccgggagtttcgcagcaataagaacagtacagatcataaagatagcacggaaacattgcctaataatcgagaatcagatctttcccctgaggaaatcttggactccagttttcgagatatcacaagaagtttaatggatgagctcttacgtaccgtaaaatcctgttcaccagagttttttgaaaaattggtggttgatttactagtcgcaatgggatatggaggtacccacgctgatgcgggtcaagcaattgggagaactggtgacgatggaatcgatggaattattaaagaagataaattaggattagatgttatctatattcaagcaaaaagatgggaaggctctgtcggtaggcctgtagtccaggcttttgcgggaagtttagaagggaaccgagctcgtaaaggggtattgataacaacctctagatttaccgaggaagcaaaggattatgtaaaaagaattgaaaagaaaattgttttaatagatggcgaaactcttgcggaattaatgattgataataatgttggcgtttctccaaaaataacttatataataaaggatattgactctgactattttaacgaagaataaaatcagttgctgacttaataggaaatctggtttcctgtgacagatttaactttgtcttacgtatcatcacttcattttaagcacttggttgcgatataaatatttagtaattggaggcttaggcttgaaaaagaatatctacgtagttggtgccgttataattcaaaacgatcaaatcctctgtgcacagcgcggcccaggcaggaccctagccaataaatgggagtttcctggtggaaaagttgaagaaggtgaaacgccacagcaagccctgaaacgcgaaatacaggaagaaatgaaatgtaaaattgagattggggagcaagtggaggacacaacgtatgaatatgattttggcattgttcatctaacaacgttttattgcaagttgttagaaggacaacccattttaacggaacatgttgcaataaaatggatgaacaaagaagatcttatgtcattggattgggccccagctgatttacctgctgttgaagagattgcatctaccaaagattgaatgctgtatttcccttttctgaaatgatttacgatgaatggaatgaatattacaataaaggtatcccacaaaaacggtgatgcatatgagtaacttgattaaaagtttggaagcctctttatatcacggttttattaatgaggcccatgaacatgcaggaaactatcgtccaaaattattagtgaaccaatcgacgaaaaatgaagacgttttaacgtcgattcgaaatgagatggagaactgtagatcatttctgttttctgttgcttttattacagaaagtggtttggcaacactcaagtctctttttctagacttaaaacaaaaaggtgtgacaggcaggattctgacctcaacttatttaattttcaatcacccgaaagtttttagagaattaatgaagatcacgaatgttagagtgcgactagcaagcgtgaaggggtttcacgcaaaaggatacatatttgaacacgatgcttattattctttaattgtcggaagttccaatttaactgcacaggcattgcaagtaaattatgaatggaacataaagctcacttctcatgaaaacggagaaattgtacatcactttaaaaatcaatttgaagaagtatgggcaaactctgagattctaacagaagaatggatcgagcaatacgaaaaaacctacgctgaagagaagaaaacaaatgagcaagtatatgattttccagtaggctatcagacgaatccgattcaagaagccttaaaaattcaaccaaacaaaatgcaagatgctgctttaaagaaaatccaggctttacgagatgaaggaaaaaacaaagggcttgtcatttctgcaacgggtacagggaaaacctatctttctgcttttgacgttcgccgttttgcgccaaagaaaatgctttttattgtgcatcgtgaacaaatattgcaaaaagcgatgaaggattttcaattaattttaggtggattgagtcatgagtttggtattttatcaggaacatcgaaacaaactgatgctaaatagggcttgccgaataagaaaaaattccagatttgacaaggattttggctatttttgtcgaatataaagtgtaaggatttcataggaaacatgtaaaaaaccttgcacttggaggctgttgcgatgtacaaaaagaccgaacatcaattaacttttgtagatgatttttttctacccttcggtggaaaattaaataaagaaaatcgctgggagctggcgcccggaaaatccagaaagctgtcggcaagcagcttgggtatgtgaaacgggatctgaaaatcattgaaaatcttcttacccaaagctccctgtctcttttgagcaaagatgaatatcggcaacttctcgtgattcatgaactttaccgccaacaggcagaaatgtacaaaaagaaaacacaccggattgtaagcacttcccagccgcacgtccgtccaattgtgcgcgacaaggcaaaagcgaacgtggagttcggttcaaaagtcgccatcagtgtcgtagatggttatgccttgattgagcacctcgactgggaaaattacaatgaagggaccactctcaaggaatctgttgaaaactactacaaccggttcggattttatccggaagcgatcttggcagataaaatttaccgaaaccgtaataatctggcatactgcaaatctcttggcattcgtctgagtgggccaaggttaggacgcccatccagaacggaagacaaaaccttggaacgcgtcgcaaggcaggatgcctctgaacgtaatgccgttgaaggcaaatttggcgaaggcaagcgcaagtatgggctgggccttattcgagcacgccttcaggagaccagcgaaatctcttcaatttctcatactgaatctggagcggagagttatttttttatttttttacacaacactattttccattttgataatcggaatttggcttgtatctgactaaatctgattcgttcagcaagccctacttaacaaatcgagggatcacatgtacagcatagaagaatttgaccggcaaggcatgcactttttccgcttgaagggggaaggggcttttgtggaagtctgccctgaacggggcggaatgatcacagccattcatattgcagatgaggatttgctgtatatgaatgaggaaacgctgtttaatcttgataaaaatgtccgcggcgggattccggttctgttcccaatcgcggggcagctcaggggcaagcagtatgaatgggaaggccaggtatatcaaatggccaaccatgggcttgcccggacgcgccctttagaagtggcaggccaatcatgcggcacggatcatgcggaaatcactttggttttccatagcacaccagagacgcgtgtttcctatccgtttgatttcgaaatgcagttaacgtactgcttagcgggcggaaaagtaaccatcctgcagaaagccacaaaccggtcagtagactcgatgccgatttgcccggggttccatccatactttgccattcgggataaagcgctggaactggagaccgctgcaacaacttatttcgattacaatggccacaaagaaaagctacttactgggaaactggagatggcgggattaaaagaatccgtgatatttgaaggtggttcagtaaaggcagctttccatgccacaaaggatctcgccattgaagcagacgaacatttccgttacactgtcgtttgggtggaagggggtgcgcctttcgtctgcatcgaaccatgggtcgcgaaaaacgaagcgcggaacacgaaagaagggctgatccttgtaaaaccggacaaacccattgtactggaagttaacttttacctggaaaacaaatcataaatcattcagctgttgctgatgacccggaatttttccgccattcctatgagcaaaaatttcagctttcatgagaaaaagcggcgattcccggacaatagaaggtatcgctgctgtatttgccactttcattacggtttatctgcttttaaagtttctgataccgttttttccagggttagcgggtttttagaacgcaataaaatgatcccaaaaatgcccatgaccgctacatccgcataagcgaaagtagtgaaagggacgtttgaaagcagcatgccggcaatggcgtttgccgaacaaagggcaccaagcggcagcatgatttttccgtgcacggcggcaaacgggaaaaagtggatgccgaatgccaaaaaggccgcaagccagatcatccggtattgatgcgaggcaaaaaaaggcccgcccattccaatgagtaaaagtacagccaggaaaattgaaatcacggtcattcgattttgaaagcggcttggacggccgaatgccagctttttgtaaacccgcttgtttgccaggatcaaggcaaatccgagaaaataaccggtagcaaaaatcggcatgttgatcatttgtgctcctccgaaaagggtgcccacgagaatgaccgctgcaatccagaccagccacagcccgcaaatccttttggacaagaaagtgagcggttcgccttttacgtaacctaacgatctaagtaatgtagaaatcatctcaatccccttttgaatgttttcttctgcctttttacctgcttttaacagcgggagccgcaagccatgggtaatagaaagccgttacatataagtataatcgaaaagcagaataaaaaatagaaaattttgtgtaattttgctgtttttcacgaaagtatgcctaagaaccaccgccggaaaagccttaaaaaactggcaggactccaccattaataagtgcctcaccgttttcttgcattctaactttttcagtgccttccagaaaatacagcgtttttttcatctaaattggacatgttaatgaacaaaaccaatttggagtgaaccagttatgattacataacggcacccatgcttcacgcgttcgtgtgtcacccgccgcttcccggatgagcgcccgcaaagctgcagggcgtaatatgcttcaactgtcgcagaaagattgccgccgttttcttcatcggcgaaaagcttccatgccccgttatcggactgtcatggcgccattcctttcttttttacgatacatatgcacaaagcggggaaacatgatggttttttttgcgcggtctctcccgcaaaatgcatcttttcagtctgaaaaaatcttcccgccgccatcatccaaataaaaaaccagcaggactgcggtggccctgctggtttctgttagtttttattgacagaagcatcatagatcgattttactgctttttccaaagcggcattaaattcttcatctgtctggctggctttgagttccccggttaaagcacgcgaaaagcttgcgatgatgccatcgttttctttcagtttttgattggcttcttcgcgggaatagccgccggaaagggcaacaacgcggataacgcgcgggtgctcaaccaatgctttgtagaaatttggcacggtcggaatggtgagcttcagcatcacatgatccttttccggcaattcgttcagatgattgagtagttctgcctttaacaattcctcgcatttttctttgtctgcactatggatgtctacttccggttcaataatcggaacgaggcctgccgcgatgatttgttttgccacttcaaactgctggtcaaccacggctttaatgccttccgggttggcttccttaatgagggagcgcattttggtcccgaaaatatggtgttcatttgcacgccggagtgtcgcatccagatccgggatcggcttcatcagctgaacgccgttttcaagattcgcaagccctttgtccacttttaaaaatgggacaatgccttttttctcggccaggtattccgcagtgtacaagccttcaatctggcggtccatcgtttgttcgaataaaatagcgccgaggatgtatttgccatcaaaagccggagaagtgatgattcttgtccgcatttggtggataagatcaaacatttcgtcttcgtttgaataggcatcttccggcacgccgtagtttgccaacgctttcggtgtgctgccgccgctttggtcgagcgccgcaataaaaccttttccgttcttgactttgtcgaactgcgtttggttcatcatgatctctccttataaggtttgttgaagggcttctttttcttcatatcccgatgaatgaaaaagaaacctctatgcataagcataacactactgattgggagaaaaaaataatatattccggtagcgcatcgtttccgctgtttcccatattctaatgttaagattgttccaatggccccgataataaacaaaaaaatggagaatggggcagatttttgccggatttaaagtgaccactcactttttattgaaagccagctttcttcatggcaatatagtaagtgagtcattactcacttatctaaaagaggagggccggggatggaagctgcggttgtgatggaacatataagcaagcagttcgggaaaaagcctgtgttaaacgatatcagcttgaaaattgggaagggccggatttacgggttgattgggccgtctggggcagggaagaccactttggtcaaaatgatggtcggaatggaaaaaacggatgccggcacggtccatgtgctgggagaaaaaatgcctgaccttgaagttttacagcatatcggctatatggcacagtcagacgcattgtatatgcagctgaccggaaaggaaaacctgaaattttttgcatcgctttataaaatggggaaaaaggtacagcatgagcggattgcctacgcagcaggccttgtccatttgcaggatgacctcaatcaaaaagtgtctgcctattccggcgggatgaaacggcggctgtcgcttgcgattgcactcattcaggatccggaattgctcattctggacgaaccgactgtcggcattgacccggaactaagggcaaatatctgggatgaactgctccgcctcaaaaatgaagaaggcaaaacgattatcgtcacgacgcatgtgatggatgaagcggaaaaatgcgatacggtcgccatgatccgggaaggaaaaattttggcgcacggctcaccgggcgaattgaaagcaatgtatgaagcagccaacttaaatgaagtgtttttgagagcggggaggaccggaaaatgaagagaaccagctttttgctcgatacggccggattaaaagaactgcttcaaacagatgatgcaaaccggatattcctgaaagcagggagggacgggcaatgaggacagccgcactcatcaaaagaattttgctggaaatgctcagggacaaacgcacactggcgctgttgtttctcgcgccgctgttgattttgacgcttatgtactttttctttaacggcagctcaaccagcccgagactcgggatcagccacgtggacgcaagccttgtaaaagtgttggataaagcggatatgaaaatcaaacactatgaaacagtaaaagatccggagcaaaccgtgctgaatggaaatcttgacgggctgcttgagaaaaagggtggatcgtatgtcctcactttgcaaaacaatgatccgtctactgccaaatcgctgcagatgaaagtgaagcaggcgattgcggcggaatccacgcagcagctggccgaacaaatcaaagcacaggcaaagacgcttcaagacgtgcagaaaatcattgccttgcaaaatgaggcgcagcatattttgatcaaacaggttcccgcacagtcacccgcctttgggaaagtgcagcagctggaagaacaggcggaaagaacgaaacgcgtgttgcaggcgccggtcaaagtggctttttccaaaccggatgtatcagcaaaatatgtatacggcaatagccatacggcatattttgatgtgctgagcccaattttggtgggtttcttcgttttctttttcgtatttttaatctccggcattgggcttttgaaagagcggacaacgggcacgctcgaccgcctgatggcaacgccggtcaagcggggcgaaattgtggccgcttatttggcgggttttggcatttttgccgttatccagaccgtgattgtcgtgttttacgctgtgaatgtgctggatatggtgcttgccggttcactctggaatgtcgtgctcattaatttaatgctcgcgcttgtggcgctgtctctcgggattttattatcatcttttgcggcttcagagtttcaaatggtgcagtttattccgcttgtggtggtgccgcagatctttttctccggcattattccgttaaaagggatggccgtctggttgcaggcacttgcaaaagtgatgccgatttattacggtgccgatgccttaaagcgggtcatgtatgaaggcatgggccttggggatgtatggaaagacttaatggcccttatgatttttgccgtcatttttattctgctcaatattgtcgcactgcggcgttaccgtgcgctgtaaagggggagaaaatttgccgaaatataatcttctggaagcaatgaaggagcaaaaaaggacggacccgaagctcacggataaaaaacaaaaaatcatggaggcggccattgccttgtttgcagagaaagggtatggcaatacgccgacaagcgaaatcgcaaaagcggccggcgttgcagaaggcacgattttccggcacttcggcacaaaagaccatttgcttgtttcgctgattgttccgttcttaaaagattcgattcctttgatggcggaagagctttttgaaaaactgctgtcaaaccatggcctcggttttgaggactttttgcggaacctgctttgggaccggcttctctttttaaaacagaacagggagattttccaaatcatcgtaaaagagtttttttataatgaagaaatccgccatgaactgatgccgtatgttgcggaaaatatcggttcccggctggtgcaggtgatccgcgttttccaggaacgcggggaactggcaggccggcctgctgcggcgatggcaaggcaaatctttttttcaatcggcggcacatttattttgaagtttgtcttcgggctgaacggatcccgggatgaagaggctgagattgaatccgccgtccggtttatcatggacggggtgcggaacagataggcgcatctgcggcaaaataaaagaacccgaaattccgggttcttttctgctattcggggcttgtcaaacgaatccggctttgcgttgcttcatgacgatttcaagggcaaagtttttccggcattttttataaaaacatgtccaggccggagctcccaagcctgggactttagagcccggtttatttattgggttctgcgattgcatggaaatcgtgtgcatcaagcggcacgatttttgtttttcttgcgattttgtacccgaaccacaagacgagaaagaacgggatgccgagataggccgcaatgacatttccccagttgatatgcggtgcgagaaatgcctggtagtcctgggcgagtgtcacaatcaggcaaacggcaatggcaaaaaccgggccgaacggataccatttcgctctgtaaggaagttcatcgagcgcgtgcccttgcgcgagaaaagctttgcggaaccggtaatggctaacgcagatgccgagccagaaaataaagccggtgatgccgatcgaattcatcagccagatatatacaacaccgtccccgaaaatggaagtgaaaaacgcaagcataccgacaactgcggttaaaatcatggccggcaccgggacgccgcgcctgtcgagctttgaaaaaatacgcggggcctgtccttcctttgccatcgcgtaaagcatgcgcgtggatgcgtacaggctggaattgccggctgacagaacagcggccaggatcacggcattcatcatcgaagctgcaaatgaaaggccggcttttttaaagacaagcgtgaacgggctgacgagaacattttcgctttccaggctgctgtttgtatacgggacaaggagcccgatgacaaggatggcaagcacatagaataatagaattctccagaaaacatttttaatcgctttcggcacatttttcgccggattttcgctttccccggcggcaaccccgacaatttccgtcccctgaaacgaaaaaccggccgcaataaagacgagaaaagtgccgagaaacccgcccggaaacggcgccttccctgtagtgaaattttttacgccggctgcttccccgccaagaaggccaaaaaccatcaataagccgaccacaataaatagaataatcgccgccactttgatgaaagaaaaccagtattccccttcgccataacctctgacggtcaaataattgagcaggaaaatgagcacaaaaaaggacatgctccataataacgacgggctgtgcggaaaccagaacttcatgatcataatcgaagcggtcagttcggcagcaatcgtcatcgcccagttgaaccagtaagtccagccaattgcaaatccgaaagcgggatcgacgaattttgtcccgtatgtgctgaaagcgccgcttgtcggcatgtaggcggacatttccccaaggcttgtcatgacaaaatacaccattgccccgaccagtgcgtatgcgacaagtgccccgcccggccccgccgaatggatcgccgcgccgcttccgagaaacaggccggttccgatggagcccccgatcgaaatcatcgttaaatggcgtgctttcagttcttttcggagtgtcctgccctgctgctttggaagatggatgtcctgctgcttttccaattccatttttcttttcccccttcattcggttcatgagaacgattgcaaaaatgtatatattctcatatcaggactttttgcaattttcatgccaaaggcggaggagctgtttttcgtgaagcaaacgcgatgcatgcaaaatttttttgcacatgcgcgaaccatgatttggcgccggcatgattatgttgcgggccgcgagtgcatttcccttcaggatgcaaaatccatttgcatgcggctaaaataatgtcaaaaagagggtcacacacagacgtggcgaacatgagaccccggcggcccgatttctgccgggatgctaataaaaatgccattgtgtttgtaaatcagggggcattttgtacaccttaaagttgagcgcagttgaaaacgccatcacagactctcttttacgcaaaaataaagaggatatatgttcagccacccagtattttgattcaacccaatgacaacgtttccctgtgcgcccaaagtataaatagtttgttgtataataaaagcaaagtaaaaagaaaacggtgatgaaagtgaaaagcaacttttcattttttaaagggaaatgggatgtgcttgcaaatttgggcgagacggctgagagaaatatttatcaggatccccatacaacgattatgaagcttaggttgtttgccgagacgttgaccaagttcgtactggcagccgaaaatattaaggaagcatacgggacatcccaagtggatcgtatccatacgctgcgcagggaaggtttgattgagccggagctgctggatatttttgagacgctgcgccgtaagggcaaccaggcgatgcacgaagcgttgaaatttacaacggaggaagcaaaagcactgcttaggctcgcttttcgcctgtccatatggtttatggaagtatacggagaatgggattttcaagcgccggaatacatagagccgaaagagcagaagaaagtcgatacggaacagcttcaacaggaatacgaagagaagctgaaaaagcttgaagacgagttagaatccattagagcaaaagcttctgaagagaatgcggaagagaaaacgaaacggaaaaagagagccgcaacttttatgcgccgccacgaactgacggaatcggaaacacgtgccattattgatgagaagttgcgtgcggccggctgggaagcagatacaacgttgttgaatcattatacacatggtacagtgcctgaaaagaaccggaatatggccattgcggaatggaaagtgggcagcggcagagcggactatgctttatttatcggtttgaaattagtcgggctcattgaagcaaaggcgaagaaaagaacgattccaagcgcgctggaaagccagacaaaagtgtatgcaaggcaagtgcgccaaattgaaaatgaagagattttgcaaacgcgaaatgaatataaggtgcctttcctttacgcaaccaacggccggccttttctcaggcagcttcaagaggaatcgggcatttggttttgggattcccgtaagccgcttgaacacgcccgcccgcttgaaggttggcactctcccgatgatttgttaatgttactgggccaggatgatgaggatgccaatcagcggctcgaagaagaaagcatctcgatattcggattgcgcccgtatcaggaaaaggcggtgctggctgccgaagaagcgctgaaagccggacaaagaagaatgctgatcgccatggcaacagggaccgggaaaacccgtaccgcgattgcgctcatgtaccggctcattaaatcgaaaaaatgcagacgcattctttttcttgtcgaccgcaactcactcgggaaacaaacggaagatgccctgaaagataccaagattgaaggttattcattctctgatatttatgatgtgaagtcgatcggggacatttcaccggaagtggcaacaaaggtgcatattgcaacggtgcagggaatggtgcgccggcttttctacagcaatgaagaaaagattccgagcgtcgggcagtacgattttatcattgtagatgaagcgcaccgcggctatacaagcgacagggaaatgtccgaagaagagcttttgttcagggatcaaaatgattatgtcagccagtaccggcgcgttcttgactattttgatgcagtctgtttagggctgactgcgacaccggcgcttcacacgacgcaaatttttggcatgccgatctttaaatactcgtacagtgaagcggtactggacggctatctggttgaccatgagccgccttatgtattcaaaacggaactttcgcaagcggggatcacttttgagaaagatgaagaagtcgaagtgtatgatgcagaaaacggcgaaattcaattggaaaaaatggaagacacccttcattttgaagtggagcagtttaacaaaaaagtgatcacggaatcttttaacagggcggtgctgaataaactggcggattatattgatccgtccggtaaagaaaaaacattgatttttgccgctaccgaccagcatgcagacctggttgtccgtttattgaaagaggcatatgccgaacgcggcgatgagatagaagatgatgccattatgaaaattacggggtatatttataagccgctcgatgccattaaacgttttaaaaacgaaaggctgccaaatgttgttgtgacggttgatctgctcacgaccggtgtggatgtgccggccattacgaatctcgtctttctacgccgcgttcaatcccgtattctgtatgatcaaatgctcggccgcgccacccgcctttgccctgagatcgggaaaagccattttaatatttatgatgctgttgggatttacgataaacttcagccttatacagaaatgaagccagtcgtgaaacagcaacatgatagtattggcgagctgtacaagtcgcttgtgaacgcgcaaacggaagaagaagccaaattttaccgcgatcagttgggcgcaaaaatccagcgccgcaaacaaaggctcagtgaagaagcaaaacagaaatttgaagagctgtccaatggcaaaaatattgaagactgggcgaaagaaattcaatattacacgccgcaggaagcaaagcaaaacagcctcttgtttgagtacatggaaaattaccggacaggtggagataaacgctatatttccaatcaggcagaccgggtaacagcagtcatccggggctatggtgaagggaatgaacgacctgaagattacctggatggatttgtaaaatttattaaagaaaatatcaatgaaattcccgcactccacctcgtttgcacgcgcccgaaagatttaacaaggcaggacttgcgtgaattaattacgatactggagacgaaagggtttaaacaatcccacttgcaaacggcctggaaacaaacgaaaaacgaagatattgcggccgatatcatcagtttcattcgccaagctgcattaggcgaatcgcttattgaccatgaaacccggatcaggcgggcgatgcaaaaggtgtacgccctgcatgactggacgccgcggcagaaaaaatggctgcagcggattgaaaagcagttgctgcaagttccggtgctggcgccaaacccggaagaggcgtttggggaagaaccgttccgcagccaaggcgggtataagattttgaaacgcgaatttggtgatgaaattgataggattgtggatacaattaatgacaatctgtatgtgatataaatacatccagttcatccatttggattttggcagttggatgaactgggtttaattattttggaagacccgatatttaaagcttgtcgagaaaaacttgacagaaacatggactttttgaggtttgggcatatataatatacatatacaattgtatatgtataattacatatgctacggaggtgattgcagtgttcaataaacccccaatagaaattgaatttgaaacaaggcaggaaaaagaagcttttatcaaatgggttttggaaccaagtgcaccatcagaagagctaaaacgcttgagtcaaattcggaaaaaagcaaaaacagtacaaatgatgcaaaatcaatccgtgcaaatttttcaaaccaaaaatgaacgaaagtaaaggtagccaatatcatatacaggcagaacccagctcctttgaatgcaagctcccaaaaagtgactgggttcttttctttggaatatagaagggcttgtttcattgcaagtaacatgtgcagtaaaaacaggaggagaaaaatgaacaaccaggaaatcgtacaaaagctttggaacttatgtaatgttttgcgggatgacgggattacatatcagcaatatgtgacggaattaacgtatctgctgtttttaaaaatgatgaaagaacaagaaaaggagtctgccattccggaaggctatcgctgggatgaccttgtggccaaggaaggaacggagttaaaaacattttatcagcatttgctgctgcatttgggcacaagcggcaatgaaatgctgcgcgatatctacagcgatgcagcgaccagcatttcagagccgaaaaaccttgaaaaaatcattaaatcgattgatgccctcgactggtacagcgcaaaagaagaagggctcggcaatctgtatgaaggactgctggaaaaaaatgcgaatgaaaagaaatcgggagcagggcaatattttacaccgcgcgtcctgattgatgtcatggtgcagctggtcgacccgaaaatcggcgaacgctgcgcggatccggcagccggcacttttggctttatgattgcagcggaccgttatgtaagacagaaaacggatgactattttgacctggatccgcaaatggcggaattccagaggaaggaagctttctccgggatggagctggtaaaagacacgcaccgtcttgcattaatgaatgccctgctccacagcatggaagggcgcattgagcatggcgattctttatccaacaacgggaaatggatgaaaaatctggatgtcattttaacaaatccgccttttggcacaaaaaagggcggcgaacgggtatcgcgtgatgacttgacgtttgacacatcgaacaagcaattgaatttcctgcagctgatctacaatgccttaaaagatgatggcaaagcgcgcgcagcagtcgttttgccggataatgtgctgtttgaaagcggcgttggtgcgcaaatccgccgcgacttaatgaataaatgcaatctgcacacgattttaaggctgccgaccggtattttctatgcacaaggcgtcaaaacaaatgtcctgttctttacgagaggaaaaaccgaccgggacaacacaaaagaagtgtgggtatacgacctccgtacgaacatgccgtcattcggcaaacgcaaccagttgacgatggcgcatttcgaaaatttcatgaaagcctacgaagccgaagaccggtcgaaagtggaagacgagcgctggaatgtgttcacacgggaagaaattgcgaaaaaaggtgacagcctcgacatcggcctgatcgcggatgcgtcattgtcctcctacgaaaacttgccagacccggttgaatcggcagaagaagcgatcgcaaaactgcagcaggcaatggatttactgggcgaagtggtagacgaactgcgcgctgtggaagcggatgaggtggctgtgaagtgaggaagaagcaaaagaccatggaggagttattggaagaagcattggtgccggaggaagagcagccgtatgaagtgccggggaattgggtgtgggtgaaattaaaaacaattaataaggataaaaagcgcaacattgatccaaaaagctttaaagacgaaacgtttgaattatatagtgtacctagttttcctgaaggatctcctgaatttattaaaggcgatgaaatagggtctagtaaacagctggttaataaagatgaaattttgttgtgtaaaattaatcctcgtattaatagggtatggaaagtattaaataaccatgggaagtttcggcagctagcttcaacagaatggattgttataagcgaaaataaagcaatttattctgagtatttactatacctgttgaagtctccttattttcgaaaactaattacatcaaatgtatcaggtgtaggtggttcgcttacaagagcaagacctaaagaagttgaaacttaccctattgctgtaccgccaataaaagagcaaaaacgcattgcagacaaagtagagcgtcttttaagtaaaatcgatgaagcaaaacggttgattgaggaagcgaaggaaacgtttgaactgcgtggggcggctattttggataaggcgtttcgtggggagctgacgaggaagtggagagaggaaaataaaaacattgaagatgccgagtcattatatgtcaaaataaaggaatctcaaagtatacggagaaaagtatcaaaggaaattaatattaaagacttaaggtatagcattccatcaacttggaaatgggtaagattaggagatgtctttacaattacttctggaggcactccaaaaagaactattccagaatattacgaaggaaatataccatggattaaaaccggtgaaataaaatggaatgctattaatgaaagtgaagagcaaattactcctgaagcagttgcaaatagttctgcaaagttgcttccaccaaatactgttttggttgctatgtatggccagggattgacaagaggtagagctgctattttaagtgtggaagcgacttgtaatcaagctgtttgtgcgttattgcctaatgattatatagcaccagaattcatattttattattttatggaaggctatcaaaggtttagacaggtggcaaagggaggtaatcaagaaaatttgagtgtctcgttaatatcagactttatttttccattgccgccattagaagaacagagagtaataatcaccactttacaaaatatatttaaaaaagaaagtaaaataaaagatttaatcaaaataaatacagacgaaataaaacaatccatcctctccaaagccttccgcggcgagcttggaacgaatgacccgaccgaagaaagtgcgatcgagttattaaaagaagtgctgcaggaacaagtgaaataagcgtaatcatggcaggggctgtttgttgagtcccctgcatttttctaacctgcctggctagaggtgatctttgaagccggctgtgttttacaaacgtcaaatcccgagccgtttcatccggtactggaggctttgccggcttaacccgagctgttctgctgcttttgatatattcgacccgtttgcctcaagtgcctctaaaatgcattgtttttcatattcaagcagccggtcttttaaaagcggtgatttttccgccggcgaattgaagtggccggactgccggtactgcatgggcagatggcgaagctcaatcatgtcttcatcgagcatgacattcatcgctgcctcaatcatatgctccagctcgcgtatattgccaggccagcggtacgaccggaagaaagtgagcacttccggtgtgatccccctgacattcatttgaaaaaggggattgtatttttgaataaaatggccggtgagaaggggcaaatcttccagccggtcccgtaacggcgggataaacagcgtcacgacaccaagccggtaatacaaatctttgcgcagccggtgatttgcaatcgcttcgtaaggcgtttcgttcatggtggcgatcacgcgcacatccaccggcttttcctgcgtgcccccgatccgtttcacttttttctcttgcagcacgcgcaaaagctttgcctgcaaatgaatgttcaacgcattgatttcgtcgagcagaagcgtgccgccgtccgcctgttcgaatagccctgcgcggtcaacagcacctgtaaatgcccctttcttcgtgccaaataagatactttcaatgagattgtcgggaagcgcagcgcagttttgcgcgatgaacggtccccggcttctttcgctttcataatggatactttgcgcgaacaactcttttcccgtcccggtttcaccgataatcagcacataggaggaagtgcgggcggcgcgccttgaaaattcaatgacttcggaaatcgccttgcttttcccgataatatggtgaaatgtatatccggtatggggctcgtggtttcggcggatgaggcgctcaattttcgtaatgtcctccgcaatttcaacagcgcccgccaattttcctttataataaaacggatacgtatggttgacggaagtaatttcgcggcctttattgttaaagtacgtctgtttgacaagatggctttcttctccggttttgagcgcctttaacaaggtgctttcttcactgctgcgaaagcggaaaacatcttccaactttttatacagtacttcacggctgtccatcccctcaatatcccgcattttttgattgtaaatcatcgtgcgcccttcttcatccactgcatgaatgccggcatcgacgagattcattattgtttcgtacaacgcgaggagtacatcttttgtttcttccatgttgcgtccacccccttcgatgataaaaattttaaaatattttgcggctttatgcaaaaattttttgcattttcactgaaaaaaccgcacgaaggcctttttttcatgatggcattctttttgcatatgaatggatagggacattgaaaagaagggagaaacaaaatggcacaagtaaaagagcaagcgaagcaagtaattgaaaaaacggaacagttcggtgcgcataattatgcgccgcttccggttgtcatttcggaagcggaaggggtgtgggtgaaggatccggacggccgccgctatatggatatgctgagcgcttattcggcactgaaccaggggcaccgccacccgaagatcattcaggcattaaaagaccaggcggaccgtgtgacgctcacatcacgcgcgttttataacgacaaacttggcgaatggtacgaaaaagtgtgccaactgacgaaaaaggatatggtgttgccgatgaacaccggggcggaagcggtggaaacggcggtcaaagctgcacggcgctgggcatatgatgtgaaaggcgtgccggacaataaagcggaaatcattgcctgtaccggaaatttccatggccgtacgctgcttgcggtgtcgctctcatcggaagaagaatataaacgcggctttgggccgatgattgagggtatcaagctcattccgtacggagatgcggaagcgctgcgggaagccatcactccgaatacggcagcgttccttgtcgagccgatccagggggaagctggtatcaacattccgccggccgggtttttaaaagaagcagcggatatttgccgcgcgtcccgggtgcttttcatggcagacgaggtgcaaaccgggttaggccggaccggcaagttgtttgcggttgactgggagggtgttaccccggatgtgttcattcttgggaaagcgcttggcggcggtgtcatgccgatttcctgtgtagctgcaaataaagaaatactgggtgtattcaacccggggtcgcacggctcaacgttcggcggcaatccgcttgcatgcgcggtatcgatcgcaagccttgaggtgattgaagaagaaaaactggtggaacgctcgctccggcttggacaggtgctcctggagaaactgcgtgaaatcgagcacccgtcgattaaggaaatccgcggccgcggccttttcatcggcgtggagctcacggaaccggcgcgctcttattgcgaagcattgaaagaggaagggctgctttgcaaagaaacgcatgaaaatgtcatccgctttgccccgccgcttgtcataacggaagaagagctggaatgggcaattgaacggatccggaaagtttttgaggagaaaaaatgatcaggagcctgctctgccaaacggcggggcggcttttttaattgggaagtatataagaggcgcccgcacatgcgaactgttttttgggtggcctgccaaaagtcactatacattgccggcagggccacgccatacattcatttgggaaatcatatgtcgttcgagtggggtactcgaacgacatttaaaggtttgtctcctgggtagcaaaaagtatttgaaagcggcggttcgcttatgatttgtctttcataaccgtgatgaaggagaattcactgcaaggaagttgttcatttgtctttcatcctctcaaccatgaaagaaaatggcggagcttttgtgcacaaatttcggcacaacgaatggtctcttagaaactattaaacagatttatttcatacgtgctgtactttaaaatccatcaaaaaagagggactccgcgtaaaatgtctacatattagaagtactgccaaaaagacaaaatgaaatgtaaagctctgcatgtggaacgacctcccctgccgtccatgcaaagacgtttaaggtggaccccatcgagttttatgggtccattatatttcgatgcggctccgaaaattgcaacggaaagaaaccaaatggtgcgcttttcttccttaaaacggggtatgaatttattatcaaatacgaggaggcgcagctatggaattccggaaagcccatcttgatgatcttcatcatttaatagagcttagaaagcagcagcaggttgcccagggcatcgaaccaaagatggacattgatgccgatttggaaaagttttttcaaaagaaattaaaagaaggctccatggtccaatggcttgcggaagacgaaggagaaatcgttgcttgcggggccgtcattttttacgaattcccgccgagctatgtgaataaaagcgggaagaaagcctacattacaaatgtgtatacaaaagaagaataccgcggccaggggatcgcgaaagaattgatgggaaaactggttgatgaggtgaaaaaggccggcatctccaacatctggcttggcgcttctgaaatgggcaagccgttgtatgaaaaattcggtttccaggaagtggatgaatggatggaactgcatttatgataaaaaagagaatgagaaaaaccggtaatccggttccaaagtgtatattttgaacttccccatctgccggtctatacttaaaatggtaagggaggaatgtacgatgtatgaaattgccattattggagctggtccggccggggcaagtgccgccatttttacggccaaagccgggaaaagcacggtgctttttgatggcggcacgagcgctaccaagcgggctttgctgaaaaatcactacggtgtaacagaaataaccggaccagacctggtcgaaaccggtaaaaaacaggcagcgcaattcggtgccaaactggtcgacaaaaaagttgaatcgattgaaaaaacggaaaatggttttaccattaaaacagaacaagggtcgtacgaaagcaaatacgttattcttgcaaccggcatgattgcaagcctcggggaagcccttggcgtcaaaaccaaacccgcaacagaaccacgcgtaaaaaccgttttcgcagtggatgcgcaaggaaagacgaatgtcccgaatgtgtgggcatgcggcacagttgccggcgtttccatgcacacgattatcacagcaggcgacggcgctaaagttgctgtcaatctcatcagtgaaatcgacggcaaacgctgggtcgaccacgatgttttaggaaaataagccgttgcaaacgaaccgggcaaaactccgcccggttttcgttttctttatttttcaatgcgggctagaactgaaaagaattcgccgcagataaagccttctgacatgcttaatgtttttccaaaatcaaaccacccactgcaaagccgggcactggggatgcagccggtacacgcgagattcaggcaatcatcaaaccttttttgcggaaagccgtctttcccatccatgggaggattgttagatacgttttttgggagaacttgtctttggtgtcattttgctttttagttggatcggaccattcaaaagtggtttgagaaactaaccgatttttttaatattaacatagtaaaatggggttgaatatcaatgattttagttagttcatgtttagcaggactagaagttcgttatgacgggaaacattgccttcgtgacataatcaagaggttagtagatgagaaccgcgctatcacagcttgtccggaactattaggaggtcttccaataccaaggatccctgccgaaatcattcaaggagatggcttcgatgtattggatggccgggcaaaagtggtagatcggttaggaaaagatgtaaccgatatgtatataaaaggcgcatatgagacattaaaactggtacaaaagatgaagatcacaactgttgtgttgaaagaaaatagtccttcatgcggaagttcaatgatttataacggtgaatttagcggcaaaaaggtacccggcaatggagtgacttctgctttattaaaaagaaacggaatcaaagttatttcagatgtagagcttacagagttggaagagttggaagaaatgctttaatatcaaaaaaggcacctttaaagaactaaaagaagagaatagtaaattgctcaacattagattttacgattttaggcagacacccccttatgtattggagggataagtagctttattttatgtaaaaaattccaaactttgttaatttggaatttctcccggaaatttattcgttctgcacaaaaaaagaaaaatcctttccaatgaggttagaaaaatccccttggaaaggtttattccggtttactcaccatggagaatctgacaaaaatttatcttgaagtataacctgcatccaaatgaatcgttgttcctgttacataggatgatgcgtcggaagcgagccaaagatttgcttcggcgatttcccgagcttgaccgaatcgaccaagtaagctcaatagcggggcatattctccttccgtaaaaccgaactgttcaataatcttcatcaaattcagcaaccggtttgtcataggataatatgaaagttcaattaacaaaacaaataaaaaagacttattgaacattggaaagcccgcaaatggtgatttcaagcagtctctttccatgtgaaggattgatgggtttgtggtaagtcaaattttgttgtattgaaaagtctctggtttgtgttgtatgtgtcaagtttttcnnnnnnnnnnnnnnnnnnnnnnnnnnnnnnnnnnnnnnnnnnnnnnnnnnnnnnnnnnnnnnnnnnnnnnnnnnnnnnnnnnnnnnnnnnnnnnnnnnnnaaagaaatcaaatggagaagttgcttctccatttgatttctttttaaggtgaattttttgcatctctatattaagatgaacgaagtatcatgtgatttgaaaaattatttagaaaggtttacttataattccaaaatattccactatcttttctattgaatttatagtaaaataaactgttaacgcatagaaaggaggcaaacgtcatggcaaagaaatcgatgattgtcaaacaaaaacgtgagccgaaatttaaagttcaggcttacacacgctgtgagcggtgcgggcgtcctcattcggtataccgcaaattcaaactttgccgcatctgtttccgggaacttgcgtataaaggcgagattccaggcgtaaaaaaatccagctggtaagccttccccgctcccctttttcggggcacgggatacatatccccgttctttccgcatctttgtaaattctttaatccctcttcatcataatttaacaaaccggtggtactctaaaatcagcggggatggcaagcgtggccatcatcggtacaccgcgtaggcggagcgggtaccttgatttccagtacagccggcatgtttacttggaaatccaaaacctttcccttctgatttttttaaaaggaatttcggcatgcatgcagaaatttttcttttatagaaaatgaaaaaaagggaggacataggaaaatgtcgtcataggcaaaaccttttatgacgaggtatgtgtcaagcttttctcgattgtgagatgttgaaggcagccttcgaatgcgattgagaactatttttatacatatgagacagttgtcaaaactgaatggttagattttatgtcaacactccgttccaatatgctactattaaaccaaagcaattggaacggagcaatgtcaatggacacgaaacaagacttttttacccgtaaaaaagaggagtccggaattgtgctgaatgcagtgcagcaagaggccgtaaagcaaacggaaggtccgcttttgcttttggcttctcccgggtccggaaaaacgacgacaattatcatgcggatcggctatttaattgaagaaaaaggggtggcacctgcacggatcaaagccattacgttcagccgggccgctgccgctgacatgaaagaccggttccgaaagctttttccgaatcttccgcccgttgatttttcaacgatccacagccttgcttttgaactcgtccgcgtatttttcagacggaacaatgctcctttcttgctgattgaaggcgaggcaggaccgtaccataagaaaaaaatcttgcggaatgtgtacaaggccattcatggagagaagatcacggaagaccagctggaggaactgcagacgtatatcagctatatcaaaaacaagatgatcccgcctgcaaaatggaggaaggtggcgacgagtgtgccggaagctgcccggattttaaaggagtatgaggcatttaaaaagcagggcaccagacagctgcttcttgattttgatgatatgctgacgcatgcgaatgaaatattaaggcgtgatcctgatcttctccgtatgtatcaggggcgttatgactatgtgctgacggatgagagccaggatacgtccatggtacagcatgccattgttgaaaagcttgtgcgccggcatcgcaatttgtgcgttgtcgccgatgatgatcagtcaatatacagctggcggggtgcggagccgtcctacttgctaaattttaataaagtgtatccggatgcgaaaattttatttatggaacaaaattaccggtcatctcaagaggttgtcacgactgccaacctgtttatcaagcgcaacaagcaccgctatgataaaaacatgttcacggaaaacccgcctgccgggccgatccggtttgtgcgcctgccggattataaataccaggcaaaatatttggcccaaaacattgccgcatccgaaaatttctcggaaattgccgtgctgtaccgcaacaatatgtcttcgattgccctgatcaacgaatttgaccgggaagggattccgttttatctcaaagataccgacaaccgctttttctcccactgggtcgtccaggatattttgaatgtgatgcggctcacgtttaccgataaacgggcggatatcctcgcgcaggtccattcgaaactggacggttatattacgaaacagcagatggaagcggtaaaggggatccataataaccaatctgtttttgacaatttaatccaatacgcacatttgaaggactaccaggtccaaaaagtgcgtgaagtaaaggagacgttccgggaaatgcggggcatgccgccgctggatgcgattcatgttattcgcggcaggctcggctatgaaaaagcgctcgaaaacatgtgcaaaagattaggatttcgaaaggatcccctgattggcattttaaacacactcgaagaaatcgcggacacgctttccaccatggaggaatttgccgcgcgtcttcagcatttggcgcaaattttaaaaacggcgaaagggaacaaaggccggaatgctgtgacgctttcgacgtttcacagctctaaaggcttggagtttgaaaaagtatatatgattgacctggtgaatgggatcattccgggtgacgatgaaaaagaagatgagttactgatggaagaatcggtccgtcttttttatgtggccatgacgcgcgcgaaaaagtcgctggaaatggtcagctatgaaaaacgggaccgaacccggacaatggactcgccgtttgttgcagcggtgaaggaaattgtcaacaatgttgaaaaggcggcaaaaacaaagccggacatggcagttgcccgaatcggcaaaaagacggtctccatcccgcagaacccgaatgcaatgaaggatgcctccgcttttgtggccggcaaaaaaatccggcaccgtgtgtttggccatggtgaaattgtagagatcaacggcgacaccatggccatccggttcgaaaaacggacggtgaaactgtctatcccgacctgcatcgaaatggggctgcttgaggaagccggtcggtaatcgtgtgtgaagaaggaaaactgaagcggatataaaaaatgccgggaatctcccggcatttttgcacccctgaccgccgcaaagggttcgcggctgtatgtaaggcaagggatgcaggccattttgatgattgcagcaaagcctgcatccggttggtgacacgggactccgtgcaaatgggagcagagcattccctgctgtttggcattactgctcgcggatgctgttttcctgcatttttcttttttttctccaaatcagcagctgttctgtcaaaatgccgactacagatccaaggattaagccgttgtttagaaaagttgccacgaccattggcaaatgttcggtcgcatgagcgggtaagaacattgcgccgattccgaccaggaaggagatgcccgctgttgtatgggcaatctctttgtccgggcttttttcaaggtcatttaaggcaaggccgaccaactgtgtgaagaccacaaaggtaacggcataaccgaccggcgcgggaatcgcagacatgatatgcacgagcggtgggagcagagcaataatggaaacgaaacaagcgccgtacaaaaatggtttcagcacttttatgccggtttgtgcaacatagcctgccgctgctgcaatcggcaccgcaccgacagcggaaaagacgccggcaagcagctggttgatgccggatatgaacagactgctccgcacccgctcttggcggactcccgtcacatttcccatgacgcgcacagacgtaatcatatttgcagttagcaaaagcccgatgaatacaccggttgtgatggcgccggaatcaaaacgcggttttccaaaatcaaatacggcgggaagagagaaccagctttccccaaatgtaatagccggcgcttcaccgaaaagcgcgaacaaaatccagccgcaaatcaaaccgagcatgatcgaatattgcttgacccacggtttctttacatgaccaaaatagaatgtaagcaatactgtgacaaggctcaaaacagcaacaagcggccggacttcctgatgggcccccgtaatgccgagcatccctttcataaaagagccgctcaactgcagcaccaacaatagcaaataaataaatgtcactaccggtgtaaacagtttatttaattggtccacaaggccggtaaaagcgagcaggaagaaaaagatgccggttacaatcagtgcgcctgacaaatattgcagagattcagtgcttgaactgtacatgctgccgacaagccccgcataaatggcaaacacgctccaccacagcccggcgggcccttcattgattggcattctgtggccgaaaatgccttgcaaaaggccgccgatcccgagtacaaaaagcgtccgctgcacaaacagggcagtctcacctgcactgaaatggaaagcagccgcaatggcaatcggggccgcgatcgacccggcgatcataaatgccatccattgcagcgacgaaatcaatgttttcatagacacaccgttctttccgttcaaaaaatggaaaataccagtaaatataattatagcaaaacaggttttacattttaaacataatacactttacggacgagggagggatagtgggcatggcggacagcggcataaactggggcggcaaaccggacggggcgcgtgctaagccatgttttttgcccatgttttaatttatataaaaatctagcgtatatgtggcgcgggctaagctatgtttggatccgcaaaaaatttctggacgatcttcatgcagaacgctttttgtttgtcattaaaagagtttgcggttgcctttacttaggcgtgctatctcgaaaaaaattatgatggataatttttgctggtgctacgtggtatcggcaggccggttatgttaaggaagctcggtaaaaaggtgttgtttcttaacatagaggccgtctacgtaaaggaagcgcggtaaaaagatgttgtttcttaacatagaggccgtctacgttaaggaagcacggtaaaaagatgttgttttttaacatagaggtcgtctacgtaaaggaagcgcggtaaaaagatattgttccttaacatagagcccgcctacattaaggaagcgagcaaaaaaggcactgtttcttcacatagaagcgtatatgtttattttttgccaaaatttgtttaggtaaaaacaattcgggcaatggatcccttgcccgaacatgttccttattctgcgacgcttacgctggcgctggcaactgcccgcttgtgttttctgattgtatagaaaatgaggattgcccatattgccgcaatggctgtataggtaacgccgtaccagccgcttccggcgccggccatttttaataaagtttgcacgttgctgaacacaatcatgccgctgacaatgacagccagcaaatgagccggcaaaattttaaccagataggctgcaatcggtgcggcgatcaggccgccaagcatgagggcgatcgtccagatccagttaatctgcatagcgccgagggataaaaggaaaccgatgcttgacgccagggatacggcaaattcacttgtatccaccgagccgatcactttccgcggttcgatgtcatttctggacagcaaagccggtgtggcgatagggccccagccgccgccccccgttgcatcaaaaaatcctgcgacaaagccgagcgggataaaaaatacgttagacccggtcttttctttgactttcaacgccccgcgcgcgttgatcagaaaccggataagaatatagaggccaagggcgatcagaaaaatagaaatgtacggttttaatgtgcttgcaggaagatggctgagaacggttgccccgagaaaggcgccgacagccccgggtacaaccagtttccaaatgatccctttatcgacattcccaaatttcatatgtgagaccccggaagccgccgttgtaaaaacctccgccaaatgcacagaagctgatgcgacagccggcgcaattccgaaagccaagaggagtgaggttgaagtcaccccgtaacccattccgagagatccatccaccaattgtgcggcaaggccgacaagtgctaagacaattaatttttgcatgttcatgttccccgctttcttcatccataaatttgattcatcctgatgtagaggaattatacgcatcagggcctatcctggtttaaacggccggccttgcagaaattaaaaatctttccgccattttacggaaagacagcgagtaaaggataagcgcttatctttcaaaatggtacccattttgctggaattggcaccttgctgctcgctgcaggttgccggacttcattgggccagatccctccgccgctcttgataagtaatttgttgtttaaaattttatcagaaaataaatggaagtcaatataattattgcaagtttttttatcggatttatacgaatggggggataaagaaaaaacccccatcagattacgctctgtcgggagttttttctttacgccggattggtgttaaaaagcttgttttaggatgcgcggggggattatggttgcttccattcaatagtccgaacgggttagcgggcccgcccattctggcagtttgatacgcgctatccacccgtgcctgtcccctgcacgcccaaggaaaccggttttatcaacacaagcctattcctttgctttgattttcagtgacaggacgaccagcacgattaaaatagcgaggcagacgcttgtaccaatcgggttgccgccgcccagcaaaaaggacaggaaaatgcctgccagtgtaagcagcgcaatccagaccatgaaagggtacccttttacacggaaggaaggcaattttgcatacgacttccggagccgcagttcggctgcacagatggcgatccagacaaggacgacggtaaatcccgggatggtcatcaaatagctgatgacctcatccggcgtaagataggccagaatcacgccggctaaaataaacagtgaggtcagcaaaatactggtgagcgggacgcctttccgggaaatttttaaaaaggcgcgcggcgcttctccggattgtgccatgttgaacagtgtgcgcgaagtggcataaatgccggaattggcggcagaaagaacggccgtcaagagcacaaaattcatcacatgggcggcagcggggatccccgtgcggctgaacacctgcacaaacgggctttccacggaagaaacctggttccacgggataatgccgcaaatgatcaggatgggcaaaatataaaaaagcatgacgcggacaacggtctgtttaatgacacgcggcagcactttttcgctgtctttcgtttccgaaatggtaacgccgatcagttccgcgccgccgtatgaaaacatcacgatcagaaaagcgctgaacgtaccgtgaagcccgttcgggaaaaacccgccgtgcgctgtatagttggacagcatggaagatgtcccggggaataaaccgaatataatcagcgcgccaagcaggataaaaacgattaatgtgatgattttaatgccggcaatccaaaattcaaattcgccgtagtacttcacttcaattaaattgatgccgactatgaaagcggcgcagagcaaactgagcagccacaatggcgcgtggggaacccagaattgcaggaagctcccggctgcaagcagttccacgactgtaacaatgacccagttaatccagtacagccagccaataatgaaagaaacccggctgccgaacgctttgtggatcagattttggacgttgaggccggggtggacgagcgccatttccccccagcgctgacatgacaatgaataaaagcgcgccgccaatcaggtaagaaacggcaacactcgggccggcaaggctgacggtatcggagctgcctttaaaaatgccggttccgatcatcccggccaatgcgatgaactggacatgccttggtgacaagcctttttgcaaatgatgttggtttttttccatttctatcaatctcacttttcttttttagataaacgcttttcagtgctaaagcatttattctattttagcagaaaaaaggaaatattgatatacaaaaaaatggaatcgccggatggcagatgcatccatatttcaccaaagtaaaatgtaaaaacggcgggacaccactcattgtagtatctcgccgttctgtttaaatttgtgccccgggacgggcagaggaaaatacgcgccagctccctctactttttatcaaacccttggtgttctacaaattccttcataaaaacgcgtgacggttctttaaaaaattgtgccatttggcctgtccaggtatcgttcctttttccgtcggtgcgttttgtgtaatattgcgaaaccgtttcattgtattccttcagatcgcgcaaaagacgttcatcagccgggtattcatcttcaaaataaacatgctcagccgccatgcgcggttttttcgcagacggatcggccggatagccgattgtcattgcaaatagcggaaggacatattgcgggattttcaaaagttcggccacttccggcagccggttgcgcaagcctccgacataacaaatgccaagccccatcgattccgcagcgagcgcggcgttttgcgcggccagtgccgtgtcgatgagcgcgaccataaatttttccgttgtctcaagtgtatcttgcgcatctacgccttccatttccgccgcaagtgcatgtttatggagatcggcacagaaaatgagcagatggccgcatgttccgacatggcggttcccggtcagttctgctaatctttgcttccgtccgggatcctgaatgccgagaatcgtataagcctggacgaaatgagaagtggcggctgcctgcgcggattccacaatcaggcggatttgttcatcagatagcggtcggtcttcataatggcggatcgaccggtgattgagaatcgtttcaatgactgtgttcattcttttacactcctgtctttggtgagtccattgtatgttcaaatatagcacagaaaataacggccggcatgaaaggtgcttgttgtccagcatggccacgatggtctgccaaaaaatatttggattaaggctaaattaacctattttcgttttggtatacccgaagtgcgaaggcgggagaacccaaacagtacatttgaacgatgaacaaaatataaatcgtttcaaagatgacggattcttgaaaaaataaatatggagtgaagtaatgttttcaagcattgccaggagcggagcggtcgttccaaaattttattttgaaaaaccccccatctttccgttgtggatttggatttagcgtttcagcttgatgccatattgttgcagtttcttataaaccgtcgttcttgaaacgcctaaaattcttgagatcttgctgatattaaagcctgtttcctccaacaaggctaaaagatgttgtttttccggttcttcttctgttccttttccttcaatcatttggtcctgctggtgtgtatggttatacgtatttagcagatagggatccaaacattcaggcagtatgacagaatgaaaaccggataaataataactgcgttcaataatgttctccaactctctaatattgccgggccattcatactgtttaagaatttggacggcatctgctgcgaattctttccgtgttccgtttttctggtttaattgtgatagaaaatattccgatagtttctgaatatcacccggcctttttctgagcggcgggagttcgatttgaaatacattcaaacggtagtataagtcactccggaatgatccgttataggcaatttcatcccggagatttttgtttgtggctgcaattattctgacatctaccggaacaggcttgtgttccccaattctcgtaatttccctttcctgtagcactcttagcaacgtaacctgcaagtcaagcggcatttctccaatttcatcaagaaaaacagtcccgccgtttgcttcttcaaaaaggccttttttgccacctttttttgacccggtaaaagctccttctgaatagccgaaaaactctgagtgaatcagatcttttggcacagcgccgcagttgatggcaatgaagggcttgtctttccgcaaactttcgtgatgaatggctttggcaaacaattctttgcctgtgccgctttccccgataataagcacatttgcatctgttttctcagcggttttggcgatatgaacggcatcaaggaatgcgggttcttttccaataatattttgaaaagaagtttttgcagccggattgctgtccccctctttcttatccccctgcttgacgtaaatcaaaaaataatcctcccattgtcgcattcggatttcgtaggcatcatctccaatcctcctccgtaaatgtttttccggtacaaggcggttgcccagctcggcaatgtctgaagataaagcatcaattaataggggctggtcattgacaatctgttctgcctgctcattggcaaatacggtgctgttccggtataaaacgatcatgccttcagggcgtcgtttcaccatcgcttcttgcaaaatatgctcaagcagcctgctttttttcctctcggtcacaagttttgaaaacaagtctatatgcaatgcaatctgcctggctgcctgctctacatttgcctggctgccggcgctcccggcaatgccaaggacacctgctgtttcatgaaatattttgatcgggatcccggctgtcgtaaaattttttaaacaagcatgtgtatgatggcgcccggtgacgacgctcaaatcgtttcgttttaaagccctgccaaatccgttttctccggcatcttccaatctccattttgaaccgggcggaaagaaaattgctgtttcggatgaagagaaaaacgatttgatcaaatgaccggaatggctgatcaaataaaaggaaaaaggaaataattccgcaagactttcaaaaaagataaaagtttcggcccattttttctgttcctggcgcagccggccctgttttatatacatgtcatcaggctgaatgatgttgttctttttgaaagtcggtttcgggtgagtatttaataaaaaaggcgccggttctatcagagtattggattgccagacaatatcaaaacccccgtttccattgactctccctatcctggaatgctgccataagtgctggttggtcccgtcgaagtgaaccggtccctgaggagctgtaaaagaagaccgggccaatgcggctcttaaagcgccggttgttgccttatccgttttatgtaaagcattaaaaagaagataaatactgttgtatgcattttccatcaccgaactaatcacatttgagtgatattccgcttgaaaatgccggacgaatgctctattttcttttgtttgaatggagctgaaataaggaaaggaagagtacaagttcaggtgataatccgaacgaattgcgtgtatttctgtttctgctgtaatcgggctgcagataggctgttcgaatccgctcctgtaaaattgtttgtaaaaagcagcaacactgtcgccaaccaatgtggaaaatataatatccggtttaagccggctgatttcaagcagtgccggttcaaaatcctggcttccgagcggatagtaagactctcccaatatttcagcgtagtattccttcgaaagcttcttaatgtgtttattggtctcccttggaaaaacataatcagaactgatcaaataaaaagttcgcccgagatttgtaatgatccacggtataaaaaattgcagttgctgattcggtgtagcaccggtgtaaaatacccaccgatttgcttcattcccttcgtacagcgtcggataaatcaaaagaatgtcctcttcttccaacagcgggagcaaagcttttcggcaagcggaagtgtaggtgccaaacaatatatctacttggttttcccctataagcttcctagccttttcgacggttacagacgggtctgactcaatatcttcaaaaaaagacgtgatcggatgcccatttatccctcctttttcatttatttccttgatcgcaagcaacgccgccttgtactgcccggtttccgtaacggctgtgggcccggtcaatgaaaataacagtccgatgcgtattccttcatttaccatctcatgacacctttcattacaaaatggaaagcctacacttattatagacaataaaggctggcaatcaagaatatttacaaaaaaatgaacagtttgtataccggtgttcatacagttttaaacaaaatgtccatatttgatgtaaggaattattacatcttcaaggaagaatatagttttaggttttcggaaaagttggcatggttcttgcaatattatttagtgaacatcaaaaatgggagggatcctcatgccagtaggttctatttcttcttctcaagatacggtaggaattgcagttgttaattacaaagtgccggttttagaaagcaaagaagaggtgatcgaaaattgccggtgcattgccgactttgttgaaggcacaaaaatgggatatccggggttggatttaattgtgtttccggagtactctacccagggttttcacccgacaaaatggaatgagttgtgtacaaccgtcccgggtcctgaaacagacatttttgcagaagcctgccgtaaaaacaaagtctggggtgtattttccatcacgggagaaatgaatccggaaggcaatccgtataactgtttcgtcttaattgatgataccgggaaaatcaggatgaactaccacaaaatcaatccgtgggtgccgaaagaaccttggtatccgggttcggaaacgatggtggtggaaggaccaaagggactaaaaataggggcgaatatttgctatgattcgaacatgcctgaaatcgtccgtgataccgtgatgaaaggcgcggaactcgttgttcgtattcaaggatatatgtacccttcaaaagaacaacaaattaaagtggcaagtatcagggcttgggaaaatctggcttattttgcagttgccaatatggccggccgggataaagtttactcttactttgggcactccaatattgtgaattttgatggcgttactttagcggaatgcggcagttctccggatgaagtgacatatgcagaattatccatttctgccatccggaatgcgcgaaaaaattggacggctgaaaatcacttgttcaatttaacccaccgcgggtatgcggcagttgaaaatggcgtcgcaggctgcccttattccttctatcaaacctgggtggagaacccggaaaaggcgagagaaatttgcgaaaccttgacaaggccgacaccggaacaagaagaaggacgtgcaaaagaaacggtcggatgattagcatccacgggatcatacaaaagcgaagggggaatggaagtggaacaggacatatattccatgtcaaatacagcaccaaaatcgaaaacaaagccgaaaagaaaattcaattcctgggttaataaccctgttttagaagattatgcattacggtatgcgccaaaatcattccggaagtggtccagtttttccgttgcaagttcagcactcggcgggatcgcttttttggccgattttgcaattggtgcttcaatctctatctcttatgggtttacgaatgcattttggggaattgttgcagcagcagtcattatctttttaaccggaattccgattggctattactctgccaaatataatgtggacatggatttactaacccggggcgcaggattcggatatttaggatcaacattaacctcgctggtttatgccacctttacatttatctatttttcaacagaaggggccatcatggcgcaggcactggaagtttattttcaccttccgcttgcgattggttatttagtcagtacgttaattgtgatcccgcttgtattgttcggaatgacagccctgtcgaaattgcaagtgtggacgcagccgatctggcttgttctaatgattgcacctatccttgccattttgatgaaaaatccgcaggcttttaatgcctggctgcactttgaaggcaattcgccggaggggacagcgtttaacccgcttttctttgcaatggcgtccggtgttgtcttatcactgatcacccaaattggggaacaggcggattatcttcgttttatgccggatcaaacatccaaaaaccgcaagaagtggctatgggcagttattttatcaggtccgggctggatcatccttggttcgtttaaacaattgagcggctctttccttgcttcttatattgcgccgagtgtcgggctggcaaaagcgaatgaaccgattcaaatgtttatcaaagcgttcagcgagtttatcccgggtacctttgttgtactgacgatcgcgacattttttgttttgctttcacaggtcaaaattaatgtgaccaatgcttattccggttccttatcatggtccaactttttctcgcggctgcttcattttcatccgggccgggtggtctggttgatccttcaggtggctattgcgattactttgatggaagctgggctgtttggttttctgaataccgttctcggtttttattccaatgttgcggttgcctggattggcgctattgtggcagatcttgtgattaataaaaaattgctgaaactcagcccgccttatatcgagttcaaaagggcccacttgtataactttaatccggttgggttcggctccatgataattgcgtccattgtctcaattttggcatactttggcgtatttggggcggtattacaggcattttcgcctttcctttctcttatactcgcctttatcttggcaccaattattgcaattgccacaaaaggaaagtattacattgcgagagaaaatcctgtcatgcaaacccagcacgaaatggttgcagggttaatggttgaggatgaagcggaagcaccagctggcagcagccgtgcacatcatcaccatcatgttaacaaaaacggtgaagtaacttgttcggtttgcgggtttgattatgagccgatggacagtacttactgcccgttccacaagggaatgatttgttcgctttgctgcagtctggaaaaagattgccatgatatgtgtaagaaggccacatcctgagcttattttgcaatactcatttgaagataaacgataaaggggagttggatatgggaagcattggcagtatgtcaaaaccaacagaagggtttttaacggcattgattcaatatcctgtgccggtagtcgattcgagaagtgatattgataaacaaatcgagcagattgtcaaaatgatccattctacaaaagcaggttatccgggcgtggaactgattgtgtttcccgagtacagcacccagggtttaaatacaaagaaatggacaacggatgaatttctttgttcagtgcccgggccggaaacggatatttttggggaagcctgccggaaagcggaggtatatggtgttttttcactgatggaaaaagatccggatggcggtgcaccttataacacggcagtcatcattgatccggacggggaaatcattttaaaatacagaaaactgaatccgtgggtgcctgttgaaccatggcaggcaggcaatcttggcctcccggtttgcgaagggccgggcgggagcaaattagctgtctgtatttgccatgacgggatgtttccggaaattgcccgggaagccgcatataaaggggcgaatgtattgatccggatttcgggttacagtactcaggtgaatgaccagtggattttgacaaaccgttcaaatgcatggcaaaacctcatgtatacgatgtctgtcaatcttgcaggttatgacggcacattctactatttcggggaagggcaggtatgcaattttgacggcacaactttagtacaggggcaccgcaatccttatgaaattgtaacagcggaaatttatccgaaattggcggaccaggcaagactgggttgggggcttgaaaataacatttacaaccttgggtcaagaggctatgtagctacgccagggggtgtgaaggagaatccatacacttacatcagggacttggctgagaatcgctacaagcttccatgggaggatgagattaagatcaaggacggctccatatacggatatccagtgcaaaatcctgtaaagagctgagtaagaaaaaggggcgctggaaaattccagcgcctttttagtttataattcggaaaatttcatcttgatcaaaatatttttctgttgtatgatgatgttaactgatgtgacatttaattgttattttttttaacgtccgatatttttatgatgaggaggtgttatgttgaaactcacccccagagaaaccgaaaaactcatgattgtggtagcggcggatcttgcccgcaggcggcagaaacgcggattgaagctgaactacccggaaacagttgccatcattacatatgaagtgatggaaggagcaagagatgggaagacagtggcagagctgatgcaattcggggcaaccattttaaaacaggaagacgtcatggaaggcgtcgcggaaatgattcctgacatccaggttgaggcgacatttccggatggtacaaaactggtcacggtccacaatccgatccgataaaggaggtgctcgaattgattccaggagagtacatattaaaaaatgaaccagttgtctgtaatgcaggccggaagacggcccggatcactgtgacgaaccgcggtgacaggccggtgcaggtcggttcacattttcatttttatgaagtgaaccaggcgcttgtgatggaccgtgccaaagcgttcggtatgcatttgaatattcctgcgggtacggctgtccggtttgagccgggggatgaaaaagaagtggagctggtatcgtttgctggaaaaagggaagtttacggcctgaataaccagacaaacggcccgcttaaaaaggagggggaagcatgactttttcaatgccgcgcaggcaatatgcggatatattcggtcccactaccggagatgcggtaaggcttgcggatacggagttgtttatcgagattgaaaaagattttaccgtgtacggggatgaagtgaaattcggcggcggcaaggtaatccgtgacgggatggggcagcatccgcatgcttccagcgatgccagcccggaccttgttttaacgaatgccatcattttggattatacaggcatctataaagcggatatcgggataaaagacggatttatttcagcaatcggaaaggcgggtaatccgctcttaatggagggggttgatatcacaatcggtgcgtcaactgaagtgattgccgcagaagggatgattgtaacagccggcggcatagatgcgcatattcattttatcagcccgcagcaaattgaaacggcgcttgcatcgggcattacaacgatgattggcggcgggaccgggcctgcgaccggaacgaatgcgacaacgtgcacgccggggccttggaatcttcaccggatgctcgagtctgcagaagccttcccgatgaatctcggatttcttggcaaaggaaactgttcggcagaagcgccactaaatgaacaaattgaagccggagccatcgggctgaaactgcatgaagactggggttcgacagcttctgcaattgatacgtgcctgaaagtggcggattgttatgatgtgcaggtggctattcacacagacaccttaaacgagggagggtttgtcgaggacacgcttaaggcaatcgggggccgtgtcatccatacataccatacggaaggcgcgggcggcgggcatgcgccggatatcattaaagcagcaagttatccgaatattttaccttcatctaccaatccgacccgcccgttcaccgtcaatacattggaagagcatctcgatatgctgatggtctgccaccatctcgatgccaatatcccggaagacatcgcttttgcagactcacggatccgaaaagaaacaattgcggcggaagatattctccatgatatgggtgtgttcagcatgatttcgtccgattcgcaggcaatgggccgtgtcggcgaagtgattatgcgaacatggcagactgctgacaagatgaaaaaacagcgcggcaaactcccggaggatacaggtatcggggacaatttccgggccaaaagatatatcgccaaatacacgattaatccggctattgtccacggcatttccgactatgtcggatctgttgaaaccgggaagtttgccgatctcgtcctctggcatcctgcttttttcggtgtcaaaccggaactgattttaaaaggcgggatgattgcttacagcttgatgggcgacccgaacgcaagcattccgacgccgcagccggttctctaccgtaatatgttcggagcgtttggaaaagcaaggcaaaagacctctctgacatttgtgtcaaaggcggcttacaataaaggcatacaccgtgaacttggtttaaacaaacaggtaaagccggtgaaaaacattcgccaattatccaaacaagacctgccatataacgacaagacaccgaaaattgaagtagacccgcaaacgtatgatgtcgaagtggacggggagctgataacgtgtgaaccggctgaaaccgtcccgatggcacaacgttactttttgttttgagggagagaatcagatgattattgaaaaagtaattggaaatgtagaaactttagagaataaaggtttgcatgtggaacgggtgtacatgaacagcgatgacctgctgaaacggatcaaacgcgccgttacggaccacggaaatgaactcggcatccgtttaaaagaaaaccaggaactgcatgacggcgatattttatacatggataatcgcaatatgattgtcgtttctgttttggaggatgatgtgctgactatcacaccgcggtcaatgaaacaaatgggggaaatcgcccatcagctcggaaaccgtcatttgccggcccaatttgaagcaaacgatatgattgtccagtatgattatttggtggaagagttgcttgaagggctcgggatcccgtaccggcgggagaaacggaagatgaagcaagcgttccgccatattgggcatcatcatgatgcataactggtatctgcttttccagctctgtgactctaatttcccatcaggtgccttttcacactcgctcggttttgaaactttttttcaaaaaaaccgcctggaggaccgggaacatgttgaaaaagcaatttctgtctacatacgcaggcagcttgcttttacagacggcctggcctgcaagcttgcgtatgaagcggcagaaaaagaagatctccaaatggttgaggaaattgacagcattttgtttgcgtcctgcctagctgaagaatcgcgggaagcgggtcgaagaatgggagagcggatggcaaaggtttgcgcggaattgtatccttcatcgttgctgtcgggttatttggaagggatcctggacaaaaggctgtgcggtcatccggcgattgtatttgcacttaccggatttggcattcaggcaccgaaagaagtggttaccggcgtctgtctgttttcggctgtatccgcacttgtgcaaaatgctgtccgcggaattccgatcgggcagacggatggacaacggattttaaccaatatccagccggcaattgatgaagcgcttggcgtgatttcaatctgtacaatagatgatctggggatcagctgcccggggcttgaaattgcccagatgcagcatgaaaggcttcatgtacgtttgtttatgtcttaatatcttaatttttcataaaaaagggagatgtgcttatggaaccggttcggattggcatcggcggcccggttggtgccggaaaaaccatgcttgttgaaaaactaacaagggcaatgcaggatgagttcagcatggctgttgttacaaatgatatttatacaaaagaggatgcaatgtttctggaaaaaaacagtatcctcccgaaagaccgaatcatcggcgttgaaacgggaggctgcccgcatactgcgatccgcgaagatgccagtatgaattttgcggcaattgatgagttaaaagagaagcatccggatttggatttgatttttatcgaaagcggtggagataatctcgcagcgacgttcagcccggaactggccgacttttcgatttatattattgacgtggcgcaaggggaaaaaatcccccgtaaaaacggacagggaatgatcaaatccgatttattcatcattaataaaattgatctggccccgtatgtcggtgcggaccttgaggtaatgaaacgggatacgatagcggcaaggggggagaaggaaaatatattcacgaacctaaaaaatgaaaccgggcttgaagaagtcgtggcctggattaagcaaaatgcgctgctgtacggattagagtcatgaactggacaggcatgcttgaaatagaagcagtaaaaaaacagaagaaaacggttctttcctcttgttaccaggaaggcgcttttaaagtgagccgcccgatttatttggatgaagatatgccgcttatttatttcattcatgttggcggaggctatgtggacggggacaactattatacggcgctgaaactcggggagggagcccgaatgaccgcaacgacacaggcatctgcaaaagtgtacaaaacgccggtgcaaccggtagcgcaaaagacggttttccatttaaaaagtggcagtgtctttgaatatttgccggatccgctcattgcttacgaaggcgcccggtttgtacaggagactgaagtccggatggaactcggtgcaagtttgttctaccgggacatgattacccctggatgggcgcagaacggccgcttttttacatatgattggatccgttcgaaattaaaggtatggatggacggagcgcttattttatttgatcatttaaatttagagccggaccgggggattggcgatatattgcaaatggacgggtttacacatcttggcacttttgccgtcatccatccgctggctgggagggaatttcttgaggcgctttatgaaaagcttgaaaaatccggcgccggcctgaagttcggtttgtcatgtctgccttccgggtacggtgtgatgctgcgggtaatgggctacaataccggattagttgaacagtttatgaaaactgcccattcatttgcaagggctgaactgcttcataaagacaggctgtttttaagaaaatactagtcagatatatttccggttagcaggatgaagggagtggtattaaatggatgtaagttttatatctgtccttgccttaggatttgtgttgggaattaaacatgcgattgaaccggatcatattattgctgtatctacaattgccagccgaagcaagaaactgtcccagtcatcccttgcaggcgttttttgggggattggccatacggcaaccttatttattgttggaatttgccttttaattataaagggtgaaattccggaaaaatgggccatgtcacttgaatttcttgtaggaataatgctggtttatcttggcattacaacgttgtctgcatttaaaagggtacgtataaatcatcattatcatgaaccgggccataagcgcaactattcctacatcaaatcagtgtgtatcgggtttgtacacggacttgccggaagcggagcaatggtactgctgacaatgagtactgttaaaagtgttgttgaatcagctatttatattttgatatttggaattggaactatattcggcatgcttttctttacaactatcctgggtatcccgtttatcataagcgctaaaaaagtagaggtaaataagacgcttacgcagatcactggagccattagtacggtattcggtatctattatatgtacaacttagggataggggaaggattgtttaaaatgtggttgcaatcattgtaactgtctcttgctgctgtatcacgacaggctggtccttccgaagtcccggattttccgtccgattaacaaaaaaacactgcaccctgatcggagggctgcagtgtttttttgttattcgaaattaagctgatagtcctctgacttgatgagccttaatttttttgagaaaacgtaaatgagtccgacatttaagataagcggcaacacgaagaaagtgcttagcataatggcaatattttttgcagtccagccgccttcagcaagatgcatgaaattgagcgggccgactaagcctgacagcccgaatcctgcactgtaaggcgtgccctgaatatgaaagacgccggccagcgcaccgagcacggcagcggtgatgagcatcgggaaagcaattttcggcttcataaagaagtttcgcatctgaattttcggcgagccaagtacatgggcaagggcggtgccgagcgagttggctttatagctggcgatggcaagcccgaccccggcggcacaaatgccaagatttgccgcccctgaactgacacctgacagcataataacggttgctacgccgactgttgaaatcggcgataaaataatcaggcagaaaatgacggcgataatcgcgcccattacgacaggctgcatgcttgtcacatgtgccaccccgacgccgaccaacccggtagccgctttaataaacggcaaaatcgtgaggccgatcatgcctggtattaaaatgcttaatgtcgggatcaggaggatggaataagcctttaaccttgttccgacccacttgacgaataaaaccgccaatgccgcagtaatccctgtattgatgacaatcccgatcccgtttaaagcaaatgcgccggcagccgttttctcgatggcgccgctcccgaccattgcggcaatgccaacacttgcaatctggatcggtgtcaattgaaaggtcatgccgaccatcacgccaatcaatacaggcagcatactcatgatgataacggttgcatccacaacatgctgcaaataaggcgcatgcgggataataagcttcaatatctccccgagcaaggcgtttgggatcagagaaacgacaatgcctatgctcattccatttaacagtttactgaaaaaatccttcattgttggagcccccatttgttttgacctcgctgacggcgctgccggataagcgccgatgcttgtctgtttgcgtatgattatataaaacattcagattatagtcaacaaaaatttttaatactttaccgcgtgtgtgcatatatgcataaaagtactaaaaagcaggctgttttagataaaaagtgatcgaaaacaatcccggttttttcaaagcggaaaatgactgaaaaaatagcggttgaaacaaaagacatagggttgatgaagaaaaaatgggcatccgtgattgctggcctggcatgaaaaatgattttttttcacgatggaagcggtataataaaagtggtgttttagaatgtgttgtgccgggcaaaagaaaggacatcaggatgcggagggatacgccatgaaaaaaattataaacgaccctggaaaagttgtcgatgagatgctggatggatttgtgtacgcccatgaaggaaaagtggagcgattggaagggacaggcgtcatttatcgtactttccgggatgaagggaaagtggcgctcattagcggcggcggcagtgggcatgaaccgagccatgccggttttgtcggggaaggaatgctgtctgcggcagtttgcggtgaagtgtttacctcgccgacgccggaccagatttttgaagcgataaaaaaagccgaccagggcgccggtgtgttcatgattgtgaaaaattatacaggggatgtcatgaattttgacatggcccaggaattagctgaaatggaagatattcaggtggagaagatcgtggttgacgatgacatcgcggtagaagacagcacctatacagcaggaaagcgcggcgttgccggtaccgttcttgtccataaaattctgggcgcggcagcagcagaggggcagacgcttcaggaaatcaaggcgttggctgaacggcttgtgcccaatgtgaagacaatcggtgtcgctatttcgccggcaacagttccggaagtcggaaagccgggctttgtccttcaggaagatgaaatggaatacggtgtcggtattcacggggaaccgggttaccggcgggaaaaaatcaagtcgtcaaaagcgatcgcggaagaactcgttgcccggctgaaaactgcgttcaactggaaagaaggggaccggtttgcgctccttgtcaatgggcttgggactacaccgcttatggaacagtatatttttaccaaggatgtgcatgccctgcttgaccgggaaggccttgccgttccgtttagaaaagtgggcaatttgatgacgtccattgatatggccggcctttctctcacgcttgtaaaactggaagatgaggcgtggcttaaatttttaaaacggccggtatccgttccggcatgggtgtaaaggaggcggaaatatgttaacagcagaaacagcaacagactggctgcatcgttttgcagaaaaaatcaatgagaacaaagcctatttgagcgaactggacagtgcgatcggtgatggcgaccacggttcgaacatggcacgcggggtggcggctatggaagaaaaactggaagccggcggttttgccacggtccaggacgtcctgaaaacagcggcgatggcgttgcttggaaaagtcgggggtgcctcggggccgctgtatggatcagcgctgattgcgatggcaaaacaggcaggggaaaatgaacaagatgttgcggcaattgtaaaagccgggcttgaaggcatccaaaaacgcgggaaagcggaaaaaggcgagaaaacgatggttgatgtctggataccagcctgtgaagcactcgcgtccggatcgctgacaaaagaggccattcaatctgccgtagaggcgacaaaagagatgaaagcgacaaaagggcgcgcatcttatcttggcgagcgttccattggccatcttgaccctggggcggtttcaagcggctatttgtttgaagctttgttggaaggcgggattctggatgagtaaaaaaccagtcggcattgtcattgtttcccatattcctgaaatcgcggccggccttgccacattgttaaaggaagcggccaaagacgtttccattacgtatgcgggtggcaccgatgacggcgaggttggcaccagttttgacaaaatgaatgccgccatagccgaaaatgaagcggatgatctgtttgctttttatgacctcggcagcgccaaaatgaatttggaaatggcaatggagatgtcggataagtacatccgcctgatggacaccgcctttgtcgaaagtgcttatacggctgccgcgctgatccaggcagatgcagaactggaagagattttaaaacagctggaaccgttaaaggtaaaataaaaaatagcccgggccggtatgaacggtccgggcattgcttttttgtggaaaaacataggattaagggcctcgccaaaatgaaacgtgtggcatccttcatcaggttttcacgcaaaacgcacgggcgccctgcatggccattttaaagccttttttgcccgcccgcgctgtacggcgttcgaaaggcccttaggaaaaacgaggccggtgctgtatgcatgttagagattcacgaaaaaccgggcgccgctttttaatatcataataaagatatttcttcctttacgtttgcggcagcagcaatggactgttttaaaatatccaggccttcctgcagctggtcgtttgtaatgacaatgggcatcagaatgcggatgacattgccgaaaatcccggcatccaaaagaagcagcccccgcttgttggcttctttcacaatccgctttgtcaatgctttatccggttcttttgttgttttgtcttttacgacttcaaatgcacacatggcgccaagtccgcgcacatccccgataaaggtaaacgccttctgccagctgcggaacgtatcaagtacctgtctcccgatttttttcgcccgttcgtttaatttttcagattcaataatgtccagtacggcaagggcggctgcgcatccaagcgggcttccggcataggtgccgccaagttcacccggatttgccgcatccattatgtcgctccgtccgattacaccgcttaacgggacgcctgctgcaagagatttcgagatggtaatcaaatctggcacaacatcaaaatgctcaatggcaaaatagcgcccggtccggctgaatcctgcctgaatttcgtccgatacgaacaaaatgccgttttcctggcagaagtcataaaccgcttttacaaattttttgcctggcacaatgaatccgccttctccctgtactggttccatgaccacagcagcaaccgtttcagcggcaacatcgttttgaaagaaattccggaactcctggatcatatagtcttcatattcttcatcagtaaaatggccgggtttccggtaagcataagggtaaggcgccttataaacttcagaagcaaacgggccgaattcgtatttatacggcttcactttgcttgtcatcgacatcgtcattaacgttctgccgtgaaagccgcgggtaaagctgataatggccggccgcttcgtatattttcgggcaattttaacggcattttcgacggcttcggccccgctgtttaaaaggatgacctttttctccgcattccccggggcgagcgctgccaatttctcagccagttcaatataaggttcatacatcatgacgttaaagccggtatggataaaatgttcaagctgttctttgacagctgcgataactttcgggtggttatgcccgacattcagcgtgccgattgcgccggcaaaatcaatatacgtattgccgtccacatctgtaacaagcgcgccttttgcctcttttgcaaatgtcggaatgccattgctgacaccgcggggaacggctttttcccttctttccaacagttctttcgatagcggccccggcagtgttgattttacatttgcataagtcattcgatacgcttcctttcatttaaataaaatgtttttcaatatttacaaggggtacttcagcagcattttccgcactttcgaattccatttccggcggctcttgcttgaatccctttgttaaaaagactaaatagatcaaaccgatggcagcccaaatgcagccaaggatttttgcgtttttatctaaatttataaataatccgaagtctaacaatgctccaatcagtggaataagaagataaagcaaaaaatttttcccggacctttgtttgccacggatataataaaagaaaatgacatcaatatttacaaaaataaacgtgagaaaagcaccaaagttcacgaaagaagtggaagttgtcacgtccatttttaaagcaaacaatgcaatgatgccgataatcacaatatcaataattggtgttttcgtttttgaattgatataaccaaatattttaacaggcagtacattgtccctgcccatggcatacaacaaacgtgccccgcttgcctgggctgcaacccctgatgcaaattgggcgataatcaatcctgccaggaaaatggcgctgaataagttaccgccgacttgttttgcaatttcaaaagcagcggagtcaatatttttaaaatgtaaataaccaggctgaacaagatgcaggacataagatgaaaggacaaatagtatcccgcctataaatgtaatcaggaagattgcacttggaagtgttttttctggttgaatggtttcttctgacattgtagtaacggcgtcaaagcctaagaatgaataacaggcaattgaagcgcctgccagaatataggatagagaagcatggctgttataaaacgggctgctgctgaataagaaatgtgcgccggttccggttacaacgtctgaaatacataaggcgataaagattgcaacaaccagtaattgaaagaccatcatcaggatatttacatttgatgtcattttgacactgacaacattaattatggatgtgattaaaataaacccgataatccatccccatgatggaatggaagggaatgccgtgttgaggtatacagcgccaatcagccagatcaccattggcagaaaaatgtagtcgagaaggacagcccagccgatcataaaaccaagatgtggatggattgattttctcgtatacgtgtaggcggatccggatttcgggaaggcttttaccatttttccgtaactatacgctgtaaaaagcattgccgccaatgcaacaatgtatgctgttggcaccatcccgtgcgttgtttctgtcagaaccccgtaagttccgaaaacaatcattggtgccatataggcaaggccgaataaaatgacttgcggcagttttaaagtgcgtgttaagtgagtctgtttctccatataaggcaccgctcctttttaattttattgaaacaccgtgtattgttgtaacgatccatacaaatcaatccttctatctgttagataatttaatttttcgtcttttttttcgtttgctgggatttggactacttcaagctgctcgtgatttcccagctttttcgccaattttccgtcaccgagaatggcagtgctttctccgaaaaaatgcgttttcaattctttcccggtgcggttacatagtatgacgggaatctgattttccatagcacggctttgtgcgtagataaattgataatgttcgtatggagacatattggccagcggcacaagaagcatttctgcccccttgatgcggagaattctggcaacttccgggaactccaaatcatagcagatcatacaaccaattttcccgaattttgtttcaaatacaggcagcacgtctcctggtgaaaagcaatctgattcctggtcaaaaagatgtgtcttccggtacactcctgctattcttccttcatcatcaatcaggattgcggaaatataaaaagtgtcatccgctcctttttctgggaatgagtaaagtgcatgcatgcagttggttttgcaagcattttggatcaggcagatactctctcctgaagaaagatcttcagcaagttcatccaggcggtctgaaatatgataaccggttaggcacatttccgggaaaatgatcaaatcggcgtgcatattctttgcctcattcatcatgctaagcattttttgcacgttgcggtctttactcccaagtacgggctccatttgggcaattgcgatttgaaccgacatcccccgcctccttgtcttgtaataattgtgtacaaaaattgtatacaatttattgtggcaaaaaattttagagatacttttggattacttgtactacgggcacagtatgcgtatattcctttgaaaagtctacgtcttcttcaatagatgaaacgtgatgatgtgccatttcttttgcaacaactggctttcgggaacggatcgcttccaaaagctccatgtgttcagaaatggcatttgcttccttatgttccgatgcatcatagaaattcaaaataatatgggataagctgatcatctttcttaatgtctcgattaaaaatatatttctggatgcttcaataatgctcaaatggaaatttttcgtagccacgagcgactggtgaaacgctttctgccggatcaacattttttctttttttagaaaagcttccatacgttgaatttcaaaatctgtggcataaattgcagcaagctcggttgccctcggttccagaagctttcgcatttcaaatatttgctgggcttcattcggtgtaggacagtaaacaaaagcccccctttttggaatgagttcaattaaggaatcaaattttaatctttgaaaaaccgtccggaccggcgtacggctgacaccaaatgctttggccaatgaactttccttcagctgctggcccggaggaaattcagcatttaagatagcgtcatgaagaacctggtaaattttttcctctgttgctttgctgtttgataccatggcatctctcctaagttgcaatttattttacaatattatgataatgcaaaaattataaaaatacaaatatattgttaaaaaatctttcgcattttttattcagacagcagcatttatcaattgctaaatcatgcaattctttgacaaaacccccatcctgcctttaagatgggggtaacggatttgcattgcaaatttgaaggagagacaaaaatggaagttgccatcccgatagattttgagcagatgaaagaagtcaaaacagagctgacgcggtttatgatgtcgtataaattcgcgctccatgaagtgatgacaaaaattgatattttaaaagaagaatttcagtacgtccatgactacaatccgattgaacatgtaaaatcacgcttaaagtcaccggaaagcattctgaaataaagcgtaccggaaaggctgtggattatcgcttgattcgatccgtgaaaacatccgcgatattgccggtatccggattacgtgttcgtttatttcagacatatatgagatcagcaaaatgatccagcaacaaaaagatgtaaagttaattgagtgcaaggattatattcaaaatccgaaaccgaacggctaccagagcctccatatgatcatcaaaattccgattttcatgtcggacaggtcggaagaagtgtatgttgagattcagatccggacaatcgccatggacttttgggcaagcctggaacataaaatatattataaatatgacgaggatgtgccacaacatttgaaggaagaactgaaagaagcagcactgcaggcagcacagctcgatgtaaaaatggagaacatccaaaaagaaatgaaggaagtcaaaaagcggaacagtgaaaacagcgtgcaccaactgatcatagacgctgaaaagcttcgaatccctgaagattttttaaaagtggccttaaatgaaacggatgggaagggatccatttgatcattaatttgaacgaaatgccgggatttgtccggttcgaaatggagaaattaggggaaatgatcaccccaaaactgaaaaaagccaaccagtatgcattttggtccaaaccgctcatttttgtggcagcgctcaatttgtttttgttgcttctcgtgatgccggcggaagaccgctcgattccgctcctccttttctgtgcggtcgccggggcgttcggcatggcgctgtcgcaggaagcgcgggttttgagaaaagaaattacgaagctcagtttttcctatatgaaaaagcggattgaaaaaagcagcattgtcacggagccggtgaaaaaacgctatgcggcattgatcgaaaaggaaccgacgaatattttcctccactttatccactttttggaagaagagcaaaacaggaaaaaagagatttggtaaaatccgcacggccgtttgatggcgtgcgatttttttgaatttttatggacagatgggaaaatccaacatttacgcggcagtattacgctcgtttgcctggatgcgcacgttttttgcccgatcgccgggaagacgggcggcaataggccgggcatttctctgcggttttttcccgtttcccgctaacgcatgcatgcggattgttggcagcggatcgccgggaaacgggcgaaaccaaaatacgccgcatgccgcttttgccgctttcgcaggtaacaatacagcgggctgcctttttcatcaataaacgctttcaaaaaataagttttgaaagcgtttaaaaaggctactctctttccggttcatgcccgattgtgattaagcgcgtgtccacgttgatgtccaagttcacatcgtatccgcagtttgacaccttgacggatgcatcattaacagagaaagcaaccaccgtatccagttcgccatccagcacggcaaaggcatattggtcttcctggtttgtgtacaagtggtatgattcgtgaatgacaacggtccaacggtatggcaggaataatgtttttgtgcccatgtctgtctctccctgaaaaaatgtagtttactgaactatattcgttccttgccgctggaattcctgctttcgcttcggcccattttgcaacatctgcctgtggaaatcagcggcaaattcgattacaataggaattatgcgaaaaacgccagaaaagaggggtagaatggaaaagaaatccatctttggattgacgatagatcaactggccggctggatgctggaacacgggcagaaaaaattccgcgcacagcaagtgtgggaatggttgtaccaaaaaagggtgaaaagctttgcagagatgacgaatgtcaataaagactgccttgcgttgcttgaggaacatttccatattcacacgttaaaacaagtggtgaaacaggaatcaaaggacggcacggtaaaatttttgttccagcttaaggacggcaatttaattgaaacggttttgatgcgccaacattatggtttgtcggtttgcgtgacgacccaggtcggctgcaatatcggctgttcgttctgcgcaagcggcctgctccgcaaaaaccgcgacctggacagcggggaaattgtagaacagattatgtatgtccagaaacattttgatgaagccggaaagggcgagcgggtcagccatgtggtcgtcatggggattggcgaaccgttcgataactttgagaatgtggtgaactttcttaaaattatcaatgcgccaaagggactggcgatcggcgcgcgccatatcaccgtttccacaagcggccttgcaccgaaaatttatgcgttcgcagaccttgacctgcaggtgaatttggccatttccctgcatgcgccgaataatgaactccggtcgcgcatcatgaaaatcaaccgcgcatacccgcttgaaaagctgatgcctgcgatcgattattatttagaaaaaacaaatcgcagaatcacgttcgaatatattttgctgaaagatgtcaatgaccataaggaagaagcgctgcagcttgcaaaactgctgcaggacaagcgccatcttgcctatgtcaatctcattccttacaatcctgttaacgagcacggttatcaaagaagcgaaaaagaatcgattatgacattttacgatacgctcaaaaaaaatggcatcaactgcgttgtgcgccaggaacacggcacggatatcgatgcggcatgcggccagctccgcagcaaacagatcaaaaaagcgaacagaacggcataatagagcccgccccgtattttggattttatccaaagcggggcgggctttttacgtttaaaaaaacgaacaaacagggtaggtatagggtacagcaattatatgctgaaaaaatattttaacaacatacgaagaatacatgataggaaaggaatgagcgtaatgagaggaaaagatgagggagacgggggcaggcgtgtttcagtccgtcccgaggaagcgggaactaggaaagaatcattttctaaaaaaacttttctgcgtttgattacaatcgtatcaacatttggcggtttactatatggctatgatacaggcgttgtcaacggggcgctgccattcatgtcaagggacgaccagcttggtttaacgccgtttacgcaagggcttgtcacaagcaccttgcttttaggggcagcattcggtgccgtgttcggggggaggctttctgaccggaaagggcgccggaaaacgatcttaagcgtcgcttttattttcgtcatcgccacgcttggctgttcgatggcgccgaatgtggccgccatggttaccttccggatgatcttgggccttgcagttggcgcgacagctgtcacagtcccggcttttttggcagaattgtcgcctgccgaacaccgcgggcggatcgttacacaaaatcaactgatgattgtctccggccaactatttgcctatacgtttaacgcgatactggccaatacgttcggggaagccggaaacatttggagatatatgttggcaatcgcaacattgccggctgtcattttatggctcgggatgctgattgtgccggaaagcccgcgctggctcgccgcaaaaggcaaatttggggaagccctcgatgtgttgcggagaatacgcgaagaaaaacgggcacaaatggaatggaatgagattcgccagacagtcgaaaaagatgccaaaatgaaaaaggcaaccttgaaagatttaaaacttccatttgtccgccgcatcattgtcatcggtgtcggcatcgcgatgatccagcagctgaccggcgtgaactccattatgtattatgggacggaaattttaaagaaatccggattttcgacaggcgcagcactgatcggaaatattgccaacggtttgatttccgttctcgccacccttacaggcattgcacttttggacagggccggcagaagaaaaatgctgattaccgggcttgcagggacaagcactgcgctccttttgatcgggattttttcgatcacgttaaaaaacagtgcggcattgccatttctcgttttgggcttgaccgtcatgtttctcgctttccagcagggcggcgtatctcctgtgacatggctcatgcagtcggaaatttatccgatccatttacgggggcttgcgatggggatctcggttttctgcctgtttataacgaatttccttgtcggcctgttgttcccggtattgttccatgcaatcggactgtcggcaacattcttcatttttaccgggcttggcatcttctccatcctgtttgtaaaaaaattcgtcccggaaacgaaggggcggtcgcttgaagaaattgagcaaagcttccatgcgcggaaggagcgttactttgcgcgcagaaaaaaatcaacattcaaccggaacaaccagccgcagcacgtgcatcacagcggcatggaccggtaaaaatttttcgaaaagggtccggcgcgggcccttttcgtttgtccatacatataatagaataagaagtttttccaaaaagatgtgaagtttcctgacgccaaacaagacagtgtttcaaaataggtgtataatagaagtgaaaaatacagattttactgactaaaggaggtgttgtgagatgttcaactggctgaaaagaaaaaattcaaaagtggttacacttgtttccccgatagccggcaatatgattccgtgcaaagatacgggcaagccgggtaaaggcattgccatccaaccgcttgaaggaagggtgcattcgcccgcagcaggaagaattacgcacatttctccggaaaacaacgccatcagtatattgacagaccaggggcttgaaattacaatccgcctcaatacagaagaagccgctatggaaagcgaagaatttgtgatcatggtcaaagaaggcgatcacattaccgccggaactccgctcatggaattttcctttcaattgacagatgccaaaacagaaaatctttactcctctgtctccgttgccaatatggatcaagtcgaaagcatggaagtcccgccggcccagacaatcggcctcgatgactgggtaatgcgggtaaaaatgaaatcagggaaccgggaataatcttttttaaagaaggtggcgcccattttttaccgtttgttaaaaggtacatagaaatgccgtaaaggcttttgttctttacggcatttttgtgtgcattgtagaaaaatcgttaaaattgcttttctgtggctgtggtatggtgaaaacaggaggtcgatcgccatgccaaaaagggaattaaacaacgggccggtcatccaaaaagaaaaggaaaccgtgtcacaaatgattgccatttactgccggaaaaaacaccaccgcaagacgctttgcgaagaatgcctcgatttacaaaactattgcttaaaaaggctttcctattgccggtttggcgaggaaaaaagcgcgtgttccaactgcaaggtccattgctaccggaaagattaccgtgaaaaaatcagggcggtcatgcgtttttccggcccgtggatgcttttgtaccatcccgttttttccatccggcatttattaaaaaaataagtttgggcgatgcatgatttgtaaattagttacataaatggattttaccggctgagtgtattatgataaaaccatatgaaattttttcatcaccaaggagcagaaaaatatgtataaattgattgccattgatatggacggaacgcttttaaacgaccagcatgaagtcactccggaagtccgggaagctttacataaagcgaaaaagaaaggcgtcaaaatcgtgctgtgcacggggcggccgatcgggggcgtccgccgctttcttgaagatttattgctgaatgaagaagatgattatgtcattgcctataacggcgcgctcgtgcaaaatacgcatacgaacggggttgtcgcggaacggtcgattggttacggcgatttggtgcggctgtacgggctcagcctcgaactgaaaacgccgatgcatttttttgacccggaacatttgtatacgccgaaccgggatctcagtccttatacggttgtggaatcttatttgacgcagatgccggtgcattaccggacattggaagagctgccgcgggatatggtgattccgaaagtgatgtttattgacgagccggagaagctgagccggacgattgaagcgattccggactgggtgcaggagaagtacacgatggtcagaagcatgccgttttattatgaaattttgcataaagatgcgagcaaaggcaatgctgtgaaactccttgccagccatctcggcatccgccgcgaggaagtgatttgtatcggcgataatgaaaatgacctgaccatgattgaatacgccggctgcggggtggcgatgggcaatgccgtcccgaaagtaaaggcgattgccgatttcgaaacgcgcacgaacaacgaacacggcgtcgcctatgcaattgagaaactggtgttgtcgtaaaaagaagggtgcccgccggcagaaggcaggcacccttctttaaaatggattcgggccgggctcttccagtgcctcagcgagttcgccgcaatccgggcaacaaatataggtatcatacaaatgatacccgacatagccgtgcgtcaactcctgcatatcccaaatcgtttcccattccatatcaaaagtcttgttgcaacgtttacagtaaaacatcacgcttccaaaatcttcctgtcccttttcctgcttctttttcttcaattggattagccccattctaaaatagttttaacggttcggcttttggcttttcgtgatgcatcttacaggcaggctgtcttttttaaaacagtttgggtcgccctgaacggattctgccaaataagacaaatttgcaaactatgatctgtatcacgccatttttacgccatcttgtttaaaataaaggaaatggcaaagaaagagggaattaacatggaaatgccacattgtgccatgattagcggcggggctgatgttgcattgtgcgcaggcctcaaccagttgaaaaatgagcatgggcacttgaatgaattaaaacgcgcattgtatgaaacggcagagcagatgataaacggtgaactcgaaaataaacgagaagcccttggcgcgctgcggaaagggactgaatccttttccgcacagctgaaacaccatgccgaacgggaagaaaatgtgctgtttaccatgatggcccgctacattggacgcgaaaacgggccgatcgccgtgatggaatacgagcatgatgaagcagaaaaatatattgagattttcttgaatggcacaaaaatcatggatgaaggccaggccgaaatgcttgcttcctatatcgttcaaatgtatgagctgctcacaagccattttttcaaagaagaaaacgtcctgtttccaatggctgaaaacctgttatcagcagctgaaaaagacgagctggaagaaaaaatctgtacaactggattacagtgaaattccaaaaaagggctgtcccggaaccgggagcagccttttttccatcatgcccatttttccttataataccgccctacggaatcagcagtgacgattgctgcatacacatggtcaggggtgacttcaaacggcatgttataaatcgtctcgccttccgcgcaggaaagttcagccactttccggagcttttcctcattgagttctttcacgcccaaatccccgagcgtgacgggaagtccgacactcaggcagaaggagaccacctcttcaatttccgctttcggcgcatcttctaaaatcagctgggcgagggtaccgaatgccactttttcgccgtggtacatgctatgggtttcttcaagcacggtaagcccgttatggatcgcatgtgccgcagcaagtccgccgctttcaaagccgattccgctcaaatacgtattcgcttcaatgattttttccactgcttccgtaacaagatgtttttctgctgccagtttcgcttttaacccttccaaaatttgcgtgtcataacaaagttttgcaagcgtaatcgccgcttccgtaacatgtccgccggccatcgtcgttttatttgcccgcttagtggcacgcgcttcaaaatacgtcgcaagcgcatcccccatgccggaaacgagcaggcgggcaggggcagaggcaatcactttcgtatccatgatgacaaacgtcgggttcagcggcagcatcaagtattcttcaaactcgccgttctctttgtagatgacagacagggcgcttgtcggggcatcggtggaagcgatggtcggcgcgacaatcaccgggatgttgttgtaatacccgactgcttttgcggtatccaatgtttttccaccgccgattccgaccatgacatcagctttctgggatttgcaggcatcacaaagccgttcgatttctggtttagaacactcgccgccgaataatgccatttgataccccgtttctttgccggcatagctttcttcaaccgttttgccgacaaggccggtgacaaattcatccgcaataataaacgcttttttgccaagcctttccgtatacgccgaaagcctggacaattcatcggggccctgtataaacttgcttggagaggtaatgattttcgtcataaaaatgcctcctctttttgtgaaaagtataacaaacacaactccatcataacttatttttgcaaaaaagaaaaccttttcatcgcatcatccatactttttcaaaaacgttcaattttcgggggagaataagtaaaatgaggctgttacgacaaaatgtgacagaaatatgatttgttttgaagaaaaatgatattttttgattgaaaacggttgattatgattaagtatatgataaaataacatcagacggaggaatgaagatgttagcagaagaacgctatcaaatcattttgcaacatttgcaagaaaaccatatcgtaaaagtgcaggagctggttaacctgcttaatgcttcagaatcaacggtcaggcgcgatcttcaggacctggaagcgatgaatctgctcaggcgcatccatggcggcgcatcgattttgcaacgcagaagcgaagaaccggatatggatacgaaaacgctcaaaaacgttcaacagaaaagaatcatcgctcaattagcagcaaaaatgatcagtgacaatgactgcatttatttggacgccggaacgacaacgcttgaaatgattccttatatagaggggaataatgtaatcgttgtcacgaacgggatcccgcatgtggaggcgcttgtcgagaaaaaaatcaaatcttaccttctcggcgggatgatgaaacgaacaacgagggcggtgatcggcagtgtcgccatgcagacattaaacagtttccggtttgacaaagcgtttctcggcgcaaacggcgtagaccttgaaatgggctttaccacgccggacccggaagaagcattgatcaagcggcgggcaaaagaactttccgaacaatgttatgtgcttgcagacagcagcaaatttcaggaagtggctttttgcaagatgtttgacatttcggaggcttccattgtcacggatgaattgccggattccttaaaatcttccattttaagcaaaacgaaggtgatatgtgagcaaagcggagcataaagaagtttttcctccgccatgataaaagcacgcagttgaaacaaaataacaaatggctcttcagcacccggtttggatgccatgataagatgtattgttttctgtactggaaaaaggagtgaactaaaatgaaaataaccgatttattggtccaggagaccatggttatggatatgcaggcgacgaaaaaagaagaagcgattgacgaattgattgcaagcctgtcaaaaagcggccgcatcaatgacccggttctttttaaagaaatgattttaaaacgcgagcaggagtcgagtacaggaatcggcgacggaatcgcaatgccgcacgcaaaaacaaaagcggtcaataaagcgacagtcgtattcgggcgcagcaaaaaaggcgtcgattacgaggcgctggacggccagccatcctatttattcttcatgattgcagcgcctgaagacgcagcggatacgcatttgcaaacattggcggcattgtcgaggcttttgatcgaccaggagtttgtacagcaattgaaacaggctgaaacgccggctgaagtggcaaggctgttcgatgaaaaacaagcggaaaaagaaggaaaagaagcagcggaaacgggtgccggcaacggttcggatgacaaattgatcgttgctgttaccgcctgtccgaccgggatcgcccatacgtatatggcggaagattctttgaagaaaaaagcggaagaaatgggcattccgatccgggtggaaacaaacggctcggaaggtgtcaaacacgaactgacgaaagatgaaattgaccgcgctgtcggggtcattgtcgcagccgacaagaaagttgaaatggcgcgctttgacggcaaacacgtcctgcaaacgcctgtcagcgatgccatccgcaagccggaagacttgatcaaccggatactggcacaaaatgcgcctgtttaccatgcagacagcacggaccgcagccaggacgacgggccggcggagaaaaagtcggtatggggaaccatttacaaagatttgatgaacgggatttcgcacatgctgccattcgttgtcggcggcgggatcttgcttgcgatttcgttcctgattgaaagaacagccggtgaacacaacacgattttcaaaatgctgagtgcgattgcaggcggcgatacaggggcattccacttcctgattgcgattctggccggatttatcgcatcgagcattggcgaccgcccggctctcatgcctggtatggtcggcggctatcttgcgtccagatcgaatgccggtttcctcggcggacttgcagccggtttccttgccggatatatgatcgtctttttgaaaaaagtatttgcagggctgccgcaggcgctgaatggattaaaaccgattttgattttcccggttttaggcctcttgcttaccggcggattgatgtactatatttttgacccgattttcaaatggatcaacaccggtttaatcggtggtttgaataaccttggcacgggcaatgccgtactgctcggcatcgttctgggcggcatgatggccatcgatatgggcggcccgttcaacaaagcggcttacacgtttgcgatcggtgtatttacgtcgagcggcaacacgaacggcatgatgatggctgccgtaatggccggcgggatggtaccgccgcttgcgattgcgcttgccaccacgttcttcaaaaataaatttacgaatcaggaaaaagaagcgggcattacaaactatgtgctcgggctgtcctttattacggaaggggcaatcccgtttgcagcatcagatccgctccgtgtcattggttcaagcattgttggttcggcgatagccggtgggctgacacaattctggcacattaacataccggctccgcacggcgggattttcgttgtattccttgccaaccatgcggtcttgttccttgtctccattatcattggcgcaattgtttccggcctgattctcgggttatggaaacggcctgttgcacagaaaaacggataatgcagcgaacaaagccttttgtataaagcaaataaggtaacaaaaaaagaccggccaggcatgccggtcttttttcattctctaatattttttaacgtgcggcgatggtggcctgttcggcagataaaagattgaagcaacggccggtccgcgttaacataaaattatcaagatattgccatcaccgccaaaaatttcgttacagctcgtttttttacacgcttttcacggatatttgggtatagttgtattagtggatttaataaacataagaggataaggggaaaaatatccatatgaacatgtttctgattttattgatcttacttttgcttgttggcatctccgatattttaaatcattttatcccatttattccggtgccgcttattcaaattgccctcggtcttgcgtttgcagccgtgccggtcggggcgcatgtcccgcttgaaccggaattgtttttcgtgttatttatcgcaccactgttgtttcatgatggaagaaacgtatcccgcgaagccatgtggaggctgcggaatccgattttgctgcttgcgctcgggcttgtttttgtcacggtgtttgcggtcgggtatattacccatctgatgattccctcactcccgtttgcggcagcatttgccctggccgccattttatccccgaccgatgttgtagcagtcagcgccatttccgagcgggtaaaaatttcacgcgtgatcatgcacctgctgcaaggagaagggctattaaatgatgcatccagccttgttgcatttaaatttgcgattgcggcagcggtcactgggtcgttttcgcttgctgaagccggcgccagttttttgctcatctcgatcggcggctttttaggcggcgcattgctggcatttttcattatccgtttcagggtgctgattcgccgcctcgggatggaagatgtcacgatccatatgctcatccaaattttaactccgtttttcatttaccttgttgcggaacattttcatttatctggcattttggcggttgtcgccggcggaatggtccatgccgttgagcgtgaacgggaacagtccccaaatctttcctaccagatcgtttcgcgcagtacttggacagttttatcctatattttaaacggccttgtctttgtccttttaggccagcaaatgccggcagtactcggcgaaatttggacaagcccggattttaataacggcacggtgattttgtatatcgttgtggtcacggccgcccttttgctgctccggtttctctgggtgtacgccgtgtggtgggtcggatggaagtcaaaaaaacagcgccttgcaaagccttccctaaagcatacggcgattacaacgatatccggcgtccggggggcggttacgctggccggcgcattctctattccgtacaccattgcaagcggagctccttttccgtatcgttctttgctgatttttattgcggccggtgtcatcctgctgacgcttgtgatcgcaagtgtgttcctgcctcttttggcgaagcgggaaggaaatgaggcagatcgttcagagcgtaaagcggaaaaaaatgcttcaatctttatcaaggaagcggcagtccagtctgtgcgtgaggaagtgaatgacgagaaccgggaagcggcagcggctgtgattgacaactatcaaaatatgctacatcaattaaaagcggaaaaaagtgaaatagattcacttgaattcaaacggattgaaacggagacaaggatgaaggcgctggaggcggaaacggattatattaatgctttgatgaaatcaaaacgcattgaccaggagatggcttttttgttccttgaatatattcaccggatggaaattgccgttaccgataaaatgaagttcaggtttttgaatttatggacccttttccggaaaggcgccacccggttccttttcctcttttacccgaataaggaaagacgccgcaaacagcggattaaccgttatgcgaaaatcaggcaaattaaaattgaaatggcggaagcggcgatccgggccattaaatcgggaatgacagaggaaaacagggaaatttcgtttcttgtcatcagtgaataccggaagtttatccggattttgaacaagccgaaaaatatggaggcatccctgaagtatacccagatggaaagggatctgcaggaaaaggcttttcaggccgagcgaaacgctgtgcaggcgctgtttgaacgggggggaatttcaagggagactgcccgcaaactccgcaggcaaatcaatatccgggaagtgtattggatggaagaacatcaactccatgcatgatataataatcttagaaggccgtgccggaacgaatgcggcatccgcaaattaatcaggacaggcttttgtgccgctttttccgcacacgggctgatataaaatggcgtaatctggccccttctattgttaatccggcttcattttgtgtagtgaatatgatccgggattgaaagcctcgttgtattttccgtattccaaaaaaagatgaatcggggtgcctgcaatgtatttaaccattcaggaaacagcggaatatctgtctttgccggaaccggtgattgagaaactgatcctgcaaagacgcatacgcgccgtgcatgatggagagcagtatttgattaaccgggatcagtttgatatttatttgcaacagctcgaaaaatacaggcagcttgtggaagaatggctgaatgaaccgcttccggaagatccggacatcaaagacgaggactaaacggatattggaggatttggaatgtttgacaaggtaaaaggaaagctgattgtgtcatgccaggcgctggaggatgaacctttgcatagcccgttcatcatgtcgaaaatggcgctcgcagcaaaagaaggcggagcggccggcacccgggcaaacagcgctgacgatatccgggccatcaaagcagaaacaggtctgcctgtcattggcattgtcaaaagggattacgaaggttcagaagtgtatattaccccaacaaaaaaagaaattgacgagctgtttgccgtaaaaccggatatgatcgcgcttgacgcaaccggccggaaacgcccgggcggcgaaacgctttccggtttaatcggatatatccatgaagccggcctaccggtgatggccgacatttcgacgtatgaagaaggattacaggcagcaaggctcggtgcggattgtgtctccacaacgctttccggctacacctcctattctccgaaacaggaagggcccgattttgcattgctcaagaagcttgtggaagccttggcgattcccgtttttgcagaagggcatatcaatacgccggctgaagcgaaaaaagcgctcgaattcggggcgtttgcagttgtggtgggttcagccattacaaggccgcagctgattacaagaaaattcgcagaggcgatgagggcatagagcttgatgaaaatgccgggtaaagccagaaacggcttctggttgcaaaccgatacaggaaggaatggcttccatacgaaaggtgacgtgaaaatggaagattcatctatctcaaagcggaaagcggaacatatccgtgttgtgcttgaggagaatgttgccgggaaagatataacaaccggctttgaaaaatatcgttttgaacatcaggcgctgcctgaactggattttgaagaaatctcgacggaaacggcttttctcggcaaaccgttgaaagccccgtttttgatcagttccatgaccggcggcactgcccaggcccgcaccattaaccggaacctggcgcaggcggcagagaaaagaggctgggcctttgcgttagggtcgacacgggctgcattggaaagcccggaacaggcgtatacttttcaggtgcgggatgttgcgccgcatattccggttttggccaatcttggcgccgtccagctgaattacggctacgggattgacgagtgccgccggattgtggaactgaccggggcggatgccttgatcctgcattttaactccttgcaggaagtcttccaaaagggcggcaatacgaattttaaagatctgcttgtgaaaattgaagacatttgcagccgcctggaagtcccggtcggcgccaaagaagtcggctggggcatcaacggccgcctcgctgaaaaactttattccgttggcgtttcttttgttgatgttgccggctcaggcgggacatcgtggagccaggtggaaaaatatttaacgtccgatccgttgaaaaaagcggcagcagaggcattttcgggctggggaaacccgacggcagagtgccttacccaggcccgcaaccttgggctgcaaggcactttggtcgcaagcggcggcttgaaaaacggggtggatgccgccaaagccatcgccctcggagccgacttggcgggattcggaagaaaactgttgcacgacgcagtacattcagtggatgcgctgctttctacttatgaacaaacagagcttgagctgaagattgccatgttcggaatcggggcaaaagacttgtccgctttgaaacaaacaccgcttttgaaaaaaatgtaaaccatcctgtttcggatggttgtgccggtatataagcttggcggaaacaaatagacgggccggaaagatctggcaagacaaccccgctgcttagaaatttgcagccggatggcccggaaatttcgggcagatgaatgggctggaaatatttgtttggaattttaacggatgtgaacgccgtatatttagccgtgggagacacgaggaacttgggtttttgccggggtaaaaaagccatacaaatattttttagaaattctaaccgcctttgcttttaagccgggggacacgaatataaaagtttcggtctggaaattttgctgtggtgaatgaccatgcaaatatttgtttagaaattccaaccggctttggcagatgtaaacgccggatattttagccggtggagacacgaatataaaagtcccgccccggaatgtgaaccggctgcataaaaaaccccggctcccgtttttgggaggccgggattttttattttttcgcgcctgcaaagttagacagttggtccatcagtttgctgcgtgatcttttattccgtaataaataggcagcacctaaagcgactgctgtcatggccattgattttttcatcatccaccacatccctttcttttttcgtatgtttgtacttttccccttgtatgcggaattaaacagtttaaagccaaaatgaaaaagcaaacccggaaaaggtttgctttgaaatggaccggttaatgggcagggcgcggtttatgggcccggttttggaaataattttttattgccgggatggcgatacggtcaagtccccagtagtaagatgcgctgcctgtaaacaacagaatgatggcgacggtgtaaaggaccgggttggtgctcgttgtgccggcaagcataaaattcaggttcataaacgcgcctgcaattaatgccgggatggttgccagcccgacaatcaggccaaggccgaccagcaattccccataaggaatcagcacattaaaaacgtggacattcggtacggcaaaatgggcgaggaacgctgcgtaccagccttgaacttcggcattttcgccagccgtttttgccagagccccctttaaaaatccggaagcgtcaaaccctcctgtcaatttatggaaacctgcttccagccattgaatgccgagccaaatgcggatgattgcccagataatgctgactttggaatcatgataccatttcattttgaacatctcctcaagataaataatgatgatttaatgtgaattccttcacatatcttacatttttagaatacagcgttggcaacggaattacaatggattccggctagttgacaagaatttgtgatatatttcacatttgtgaacaaaacattaaaaaagcggcaagccaggctcaccgctttttttcgatgttccatttccatttgaaaacagctttcccacggccgttgccggattcgttgttgctttggtcaagctccggatcccttctgccgactttattttaccggatttccgaaacttccctcgaaaaccgattctttcacaggcctgcgtgcagaaggcgtctctctttcctgcagggaaggaggcagtgcctctttttcaccgcggtacccgatggcaataagggcgtcaattgcataatcggccgggatgttcaatacttcacgtgctttttcaaaatcaaagcccgtcatcggatgcgtggcgagcccttttctgacggcttcaagggaaagatatccccatgctgcgcccgcatcaaaagcatgtgaaccgatcgggccggtttcactttccgttttcgagagaatgagcgcaaatgctgggacgttcttgcaccacatcctgttgtactctccgagaaacgacagaatcttttccctgtcttcctttgtacgtgcaagaataaagcgccaaggctggtggttataagcggacggcgcccagcgcgctgcttcaaacaagctcaaaagcacctcttccggtacttctttttccaaaaaagaacgcggtgaccatctttccaaatagaccggatcgatatcatagtgcgcttcacgcggcgatgttgtctttaccatggggattcctccttattgatgtcatatcttttttatattaaaataatccaacgcaatctacaaacgattcaacttgggcgtatgtgtcaagtttttctcgacaaggtttaaatatcgggtattccaagacactctttttgtacactttcggctaccgtgcttcacttgctcggtgtaattttcggaaaagatgtgatatttccgtataaagatggacaacggggatgttgaggcgcgcgaaattcactcgctttccgcgggcggccggcgagcctcctcgctcgtacctcgctgcggggtctctcctggctcgcttttcccgcaggagtctcgtaaatttcgcgcgcctcaacgatcagtccccactgagccaggcttaaaatgaaagctctaatattttgcttaaatgtcccattgccgatgaactgcttgaatgcagggcaactgatccgtgctttacgcccactgacgggcgtacaggctgcttgagtagttgagacatcctgatggattgtttcaagttccgttgctttctctcgcttcttgaacggtgtttcagataggcttctctcaatgtcccattgnnnnnnnnnnnnnnnnnnnnnnnnnnnnnnnnnnnnnnnnnnnnnnnnnnnnnnnnnnnnnnnnnnnnnnnnnnnnnnnnnnnnnnnnnnnnnnnnnnnngtaaaattttacacatacaacttgggcaaaaaatgtatttatgtgcctgttattgtataatagtacccaggagaaaatacgaacaggatgatctgaattggttgagcttttgctttttgaagaagatgttgaagatatgtattcccccgctattttccgcagaggaatgaggtattaccttgaaggacgggtaaaaaaattgatacctgattctactatggaatttacctggacggcaatcgtaaaaggatccaaaacctattacgtcaccgttcggtatgacgaagaattcgggggatttgcaaacgaatgcacgtgcccggcatttgcacaatacggcgagtgcaagcatgaagtggcggccatgcttgcgattgcaaatagggaggaagaggtggcggaaccggatattggcgatgttccggagacgcaccagaatatgaaaactttacaattaatgaatattttttccggccttcagcaaagcatgatggaaaccaaacaccatgccgcgagaaagccgctccgtcttgaatattttttaaaagctacgaacatttccggctttggctctgaccactttttaaccattgaatttaaaatcgggcccggccggacatatgtggtgcgcaacataaaagaattccttggccatgtcagccacgggaacccgcatgaatttacgaaaaacttcacttatgatccggatgaatatgagtttgaaaaagaagatcatgaaattgtggagatgctgctttttatgctttccacccagcaactgtacgaggcttctatcgataattggtacagatatacatttgagcgggaactggttattcctccgtttatcgcaaggccgctcatagaaaagctggcaaaccgcaagtgcaaatttgaatatgggcgttatgcctcagactcgattacggtgcaaccgggagaagaactgccgctttctttccggcttgacggcaacagacagggcggcccgggcttttcactgcagctgaagagcttaagggacctgcttttgtttgaacaatacgggcttgcattttacaaaggggttttttatgaaacgcccgatgagcaacttgttctcttaaaggcgctcgaagatttttacaaaaacagcggcgatgaagtagagatccggcaagagcagataagcccgttcctttccaatgtgctgccaggcctgaagcggatcggaaaagtaaagcttacaaatgaaataaaagggaaaatcgtccagccaaaactgcaaacgaaaattttcatggacaacgaagacgaaaaaattacgctccggattgaacatcattacggctcccgtgtcattgatccgtttacggacaaagagaccgccgatgatgataaaattttgctgcgcgatgtggaaaaagaacagaaaatcatgacgatgattgaacagtccccgctcaaatataacggcaaacagctgtatttggaagacgatgaagaagcgctgtacgaatttatttttactattctaccgcagcttgaagaagaagcggaagtgtatattgcaggcgggataaaatcgtattttcagacaagccgctacacgccggttacatcggtggatatggatacgagcggaaattttctggaagtcaattttgacatggacggcattgatgaagaagaaatccgcaatgtgctccggtccgtcatcgagaaaaaacggtattaccggctgccggacggggcttttgtctccctcgaaagcgatgcattcgaacatatcgggcagctccttaatgaactgcatgtctcgaaaaaagagcttgaagacaaccgcctcaaagtcccggtttaccgcgggctccaggtggaagagctgatgaaaacgcgtgataaatacgccgttaaatttggcaaagcgttccggaagcttgtccagcagctgaaaaatccggaagatacggattttgaactgccaaaagggcttcaggcgaagatgcgtgattatcaggtgaccgggttccaatggttcaagtcgcttgcttattaccgtcttggcgggattctggctgatgacatggggctcgggaaaacattgcagagcatctcttacatgctgtcggaaaaagaagcgaatccgaatatcaatccgttcttggttgtagcgccggcatccttgatctacaactggaaaagcgagattgaaaaatttgcaccggggctgtcgtcagtggttattgccggcacgccttccgagcggaaagccttttttgaagcgggcgagctgccggatgtgctgatcacctcatacccgacactgcgccaggatatcggggagtatgaaaaaatggaattcaacaccctcattttggatgaggcccaggcgattaaaaactatgcgacaaaaacagccgccgccgtccggaatgtgcaggcggggagaagatttgcgttaagcggcacgccgattgaaaattccattgatgaattatggtcgatttttcaggcggttctcccgggctttttcccgccgctatccgaattccggaaaatggagaaggaaaaaatttcgcggatggtgcggccgttcattttgcgccgcgtcaaaaaagatgtgttgaaagagctgccggataaaatcgaaacgaatcaattgtccgagctgacgaaaccgcaaaaagaactttatttggcgtatttggacagaatccggcatgaaaccgcccaaacattggctgaaggggattttaaccggaaccggattaagattctcgcgggtcttacccgtctgcggcaattgtgctgccatccggccctgtttgtggagaattaccggggcgagtccggaaaactcgagcagctcgttgaattggcccatacggcaatcgaaaacggaaaacggatgctcattttctcgcagttttccagcatgctccagctgatccggtcgcgtttttccggcgagggcatcgattccttttatctcgacggccagacgccatcacgcgagcgggtcgaaatggcagaccggtttaatagcggcgagaaaaatgtctttctgatttcgctcaaggcaggcggcaccggcttaaacctgaccggcgccgataccgttgtgctgtacgatttgtggtggaacccggctgtggaagaacaggcggccggccgcgcccaccgcatcggccagaaaaacgtcgtccaggtcatccgcctgatcgcccgcggcaccattgaggaaaaaatatacgaactccagcagaaaaagaaagaactgatcgaaaaagtcatccagccgggcgaaaccatgctgaacagcctgaatgaagaggaaattaaagaactgctgggcatgtaaagggaatgtggcggcatcggcattgccccccttttttacggcccgggtggaggcaggtatgtaaggaaaacccccgcagctgtttggctgcggggattttgggatgagagtagaaggcgaaaaagttctatatttattcaaaaaacaatttctttattgttatataatggacataaaaggaggagatttatggagtccattgcacatattcgtgaaagcgaccagaaggtacaaacagttgaagaacatttattggcagcgaaagatttggctgaaacttatggcgaaaagattggtgtaaagcacataaccgggcttgctgcactacttcacgatttagggaaatatacacacgcattccgcaattatattttggaagcggtaaacaaccctgatcgcccgccgaaaagagggagtgtagaccattctactgccggagggaagcttttgtacagcatgttccattcagggaaaaccagtcctcataaagcattgttagctgaaatggtgggcaatgcaatcatttctcaccattcctatttgcaggattttatcagcccggaaatggaactaaagtacttaaatagagttgaaagtaaggaaattgacgaatttgaaacggcaaagaaaaacttttttgaaaaagtgatgagcccatcaagcttttctgattatgtgaatcaggccgaaattgaattaaagcactttattatgaaagatgcatcaaaaccgcttgcgcataagatgatgtttttaacgaaatatattttcagtgcgctaattgatgctgaccggacgaacaccagattgtttgaggaaaacagaccggaaatagagcatactccagttgcaaagttgtttaatcaatactatgaaaaactgttacttactttagacagttttaaggaaaattcgagcgctaatgcccgtatcaaccgattaagatccgggatgtccgagcaatgcgatgcttttgccgagaaaccgtccggtatttatacgctttcgatcccgaccggaggaggaaaaacttttgccagcctgcgatacgcattaaagcatgcccaactttataacaaaaagcgtatcatttatgtcgtgccttttacgacaattatcgaacaaaatgctgaggaagtgcggaaagttttgcaggacgatgtaaatattcttgaacatcattcaaacgtcgtcgaagatgctgatgagaatgatgaacaacaggacggaattatgagtgcgcagcaacggctgaaattggcaagggataattgggatgctccaatcatttttaccacaatggtgcagtttttaaatgtcttttatgcgaagggaagcagaaatattagacgccttcataatatgagtgaagcggtgctaatctttgatgaagtgcaaaaagtgccggttccttgcatttccttatttaatgaagcactaaactttttaaaaacatattgccattccagcattcttctttgtacggcaacccagccggcattaaattatgttgaacatcaattgcaggtcagcccaaattcggagattatccgcgatctggaaaacgtattagacgcctttaagagagttgaaattgttgacagggcaactgatgaatcattcaacaccgaaaagcttgccggctttattgaggaaagaatgacagaggtttccagtgtactggtgatattgaataccaagcgtgttgtaaaagaattatataatcatttaaattctaacgataatacccatattttccatttaagtacatctatgtgtgcagcccaccgcaatcaaattttggaagaggtaaggcactgcctgaataccggtaaaaaagtaatatgtgtcagtacccaattaattgaggcgggtgtcgacgtgagcttcgattgtgtcatccgttccttagccggcctggattcgattgcacaggcggccgggcgttgcaatcggcacggagagaaagagaccggttttgtgtatgtgatcaaccatgaagaagaaaatctaagcaggctcccggaaataaaaaaaggcaaagagatttcaaagcgaatttttatcgatttaaaaaataatccgtctatccataatggaaatgttctgtctacccaagcaatggaaaaatattttaaagagttttatacagaacttaatacccgtttggattacgatgttccgtctcttcagagtaatatggtggaaatgttaacagctgaccccaaccactatagttatgcgagggcgtatcgcagtaatacgaagaaggaatttccgttgttcttaagcagcagtttttatacagctgcagaaaaattccgtgtgatagatgataagactacttctgttattgttccttttgggaaggggaaagacgtgatagccgaattaagcagcaaagtaaccattgaagatctcggcaaactcatgaaaaaagcacagcagtacacgatcaatctttacagtcaggaactacaaaagcttgagcaaaatggcggaatcataggtttgtttgacggtaaagtattggctctcaaggaaggtgcatatgatcatgaatttggattgaatgtggagaatgacagcgaattggattttttgtcaatttaaaaacctatcataatagataggtttttaaatcatataatatatatttcaatccgcgctttcacagcgactatattatcataacacaaaaacagaaagaaagattttcttcatataatatataattttttgactagaaaagattcgcattgtatactgaatttatcaaaaaagccaaaaaatgagaggaggggaaaaatgaggaattctatagaatttgaggtatatggcaaatatgctttgtttactgacccgttgacaaaaatgggaggtgaaaaattatcctatcaaatacctacctaccaagcactaaaggggatagttgaatcgatctactggaaacccactattctaatgataattgatgatttgcgtgttatgaatccaatcaagatggagtctaagggtgttaggccgattgaatatggcggcggcaatacactggcaaattacacatatttgcgtgatgtacgctaccaggtaagggcacatgtgtatggcaaaataaaagtgcagagctttgcaaaggaaaaatgcagagtcctgcactaaatttttgtgcataaacaaaaaaagacttgccagtcaccccaagtcccactacagtaattgtgtcgagcaattggtagtggagaaaatacagcacatttcatttttaacccacacaggccggatttggcatttgaccgtaacgaaaataaacaccataacattcttaaacgatccttgaaagccgggggaagaagggatattttccttggcgcccgcgagtgccaaggttatgtggaaccctgtgtattcggggaaggcgagggttattatgaccaaacagaagaagtgtattttggaacaatggttcacggcatcaattatccggatgaaaccggccgtaacgaaatggaagtcaggttgtggaaccctgttatgaagaatggcgtaattcattttatccgtccggacgaatgtaaacttgtgagaaaagttgcggaaatagaaatgaaggcctttactaaagaaaatgtaaaacctgccgatgaacttttaaaagagatagagggaggaggggaatcgtgagtgagctggttactaaacttatatgagacttatcaagcaaatgaagagcaggtcgggaaaattgaaaagaagagaaatgatcaggagtacacgcttcttccggtttcgcataccacacaaactgcacatttagaagtgcaggtaacggaggatggaaatttttattatgcggaggtaattaatgataaaaaggatgcgattacattaatcccgtgcacagaagaatcatccagccgtgccggttcaaaaatagctccttacccattgcatgataaattgatttatgtagccggcgactttgtggcttatggaggaaaaataaaaaaagaagagcctttctcttattatattcaacaattaggtgagtgggcaaattctccgtttagtaagtatgtgtcaagtttttcnnnnnnnnnnnnnnnnnnnnnnnnnnnnnnnnnnnnnnnnnnnnnnnnnnnnnnnnnnnnnnnnnnnnnnnnnnnnnnnnnnnnnnnnnnnnnnnnnnnntgaggcgcgcgaaattcactcgctttccgcgggcggccggcgagcctcctcgctcgtacctcgctgcggggtctctcctggctcgcttttcccgcaggagtctcgtaaatttcgcgcgcctcaacgatcagtcccgactgagccaggcttaaaatgaaagctctaatattttgcttaaatgtcccattgccgatgaactgcttgaatgcagggcaactgatccgtgctttacgcccactgacgggcgtacaggctgcttgagtagttgagacatcctgattaattgtttcaagttccgttgctttctctcgcttcttgaacggtgtttcagatagacttctctcaatgtcccattgagtatgccttgtttgattttcaccatggcttctgcgccaagttcactccaatgcatgcccctttttttcatcctgaaggagatatgcctttgattcgattccatcgctcctaggcctctcgcaccttccggcacgtttttcaccctgtctctccagtcaaaaatgcggtcccagtttttcaagatatacgaacggaattccttgattttcttgagggcctttttatccgtcaaggtgctttcgtgcgtatccaaatataacgtgaattggtccaggtcatgcgttctaatcgcttttctaatttgctccttgatctcgctctttccgcccccaaatgtccttatgatggcttgtgcaacgtggtaggtatccagctggttgagcaccggaaattccgactgtgagaaagctgtttgaaaccgttcagctgtgtatcccgcacctccatcactgtttgtaatgacatgcgttttttcgagggagtaggtgttggcagctgtggcttggacttcatcccaaaatgtctggatggcttccgttgtcatgatgactgtgggctgacgcagggagacccttttaccattggtttgccatccctcatagagaatggcgtggtggacttccatactctgtttcttttttagtccccgaacgaatacaccatctgcttcagaaaacaggtagtctaccttcttcccctcaggcagggaaacagctatttctagctcttctacaagtgccttatcggcttccgcctgagttttccctacgtgttttaccatgttccctacagttgtgtgactaagactcactgctgtccactcttttaaaatatcagctacttcccgataggtgttctcacttgccaactctgccacctttaattccactaacgggctgtatcgttggtaaaattttacacatacgtttagtaatgcgaaagtgcagagtatctatgcatatttaaaaaagaaacagttaatccacgatcttgtagaagcgggaattttgtttttggataacaacgggcagttaattgataaatgggacagtaagtatggtgataagcctccattatattcaacagttacagggagtgttgagagcgcttttgtaaggtttactgtttattcgcctgaaaaaatcctgaccaaagtatggaaagatccggaaatgtacgaatcatttataaaattttacaatcaacatttaagtgaccgggatctttgttatgtaacgggtgaatttttgccaagcacagagaggcatgctaataaaatcagaaattccggagataaagccaaactgatatctgcgaatgactcaagcgggtttacgtacagagggagatttactgaaagcaaacaagtggcaagtattagttataaagcatcgcaaaaagctcataatgcgctgaaatggttgatcaacaagcagggaaaaataatcgataacagagtatttcttgtatgggaaaacggcggaaatgaagtgccgtcagtcaccgaagattcatatgacattactagtctcgatccttttgcgaatggaaacaatccaaaaatagcttttacaaaccaggaatttgcacgtgaattttctaaggcaatggatggatataaaagcaatctttcgactgaagccagtattaatattttggttttagattcggcaacaaccggaagaatggctgtcctttattatcgaaatttaaacaaagagatttattttgaaaatttggtaaaatggcatacaacttgcgcctggctccaccgttatcgaaaaaatgaggacaaccagccaattttattttttggtgcgcctgcaacaaaagatatcgcgttcgcggcgtatggtccgaatgcaagcgataaagttgtaaaaggtttaatggaaagaatgcttccgtgtattgtggaagggagaagaatcccaacagatattgtcagaagtgcccttcggcgtgcatctaatccggttgctctggaaaaatgggaatgggaaaaaatattaagcattgcttgtgcactgattaataaagaggagggatataatttggcacttgataaagaaaataacaaccgcgattatttattcggaaggttgctggccattgcggacgtactcgaacgaaatgctttggattccggcgaaaatcgtgctaccaatgccatccgatatatgaatgcattttcacagcatcctgcacgcacttggggaacgattcaggccagtttgcagccctatcaagtccggctggggaaaaaagggacgtactacgccatgttaatagatgaagtcgcttctaaacttaaatatgaagattttaatgacaggcctttatcgggtaagtttttgcttggcttttatagccagcgctatgatttatatcagaagaaagataccagtactgttggacaaactaaagaataaaagattgagaggggactaattatgccagctttagatcataagattgattttgccgttgtgttgtctgttacaaaagctaatcccaatggagatccgttgaacggaaaccgcccgcgccaaaattatgatggttacggggaaatttctgatgttgcgattaaacgtaaaatcagaaaccgtcttcaagacatgggcgagtcaatttttgtgcaatcaaacgatcgaaaaaatgattcgtacaacagtttaaaagaacgggcggatgcgaatccggaattgaataagatttttaagtctaaagacggatcaggtgaatcttttgctgcgatcgcgtgccaagagtggattgatgtccgcagtttcggccaagtatttgcttttaaaggatccggcaataaaggtgtatctgtaggggtaagaggccctgtttcaatccatactgctaccagtgtatctccaattgatattacaagcatgcaaattactaaaagtgtaaactctgagcctggcaaagaccggggttccgacactatggggatgaaacaccgcgtagactttggtgtctatgtattttatgggagtatcaatccccagttggctgaaaaaacaggattttcaaatgaggatgccgaaaaaatcaagcaggccttagtcacattatttgaaaatgatgcttcttctgcacgtcctgaagggagcatggaagttaaaaaagtgtattggtgggaacaccagtccaaattgggccagtattcgtcggcaaaagtgcatcggtcattagccgttacaccacttgtagacaatcctaaaacatttgaggattatgagattactttaaatgaactgagtggtttaaaggttgacgctatcgatggcatttgatgaagatgaatacctgatgttgtcgggcatccaacattttcaattttgcaagcggcaatgggcattgattcatatagagcaagcgtgggaagaaaatgtaagaacggttgaggggcaaaatatccatcaaaaaacggatagcccctttatccgtgaaaagcgtggtagtaaattaattgtccgggcaatgccaattaaatcaaatgaattgaaattgactggaatatgtgatgttgttgaatttgtcaaggatgagaatggcgttgaaatttatgggaatgaaggaaaatatattccttatccggttgaatacaaacgcggcaaaccaaaaaagaacgattcggatattttacagcttgttgcgcaggcgatatgccttgaggaaatgcttctatgtgaggtcaacaagggctatattttttataatgaaatcaaacgccggattgaagttccgataaccctggatgaaaaaaataaagtaagaaaaatcgctgctgagatgcaagaatactatcagcgccgctacacgccaaaagtaaaaaccggccccttctgtaaccaatgttcccttcaaaatatttgtttgccaaatatcattcgtaaacgtgctgtttccagttatatagaagggaagataaatgagtgaagaaactcctgaacactttatttattacgcagccggatgtttatttatccttggatggagataatattgtgcttttaaaagagaaggagcaattggggagactgccactacacaatttggagtcggtcgctgcttttggttataccggggccagccctgctttgatggggtactgtgcagaaaggaatatttctctcatattctttacaatgaacggccgctttctagccagagtaattggtaaaagcagaggaaatgttgttttgcgaaaaaaacaataccgtatctcagatgatgaaatcgcttcggttcaaattgccagaaattttattattgggaagatatacaaccaaaaatggattcttgaaagaatgacaagagattatccgttgcgtattgatgttgcgcaatttaaggatgtttcccagcttttatccgccattatcaagcaggtcagactatgtgatagtttagaaacattgagggggttagaagggcaggctgccatcaattacaataaattatttgaccagatgattctacagcagaaggatgattttttctttcattcccgttcacgccggccgcctttggataacgtgaacgccatgctgtcctttgcttatacattactggcaaatgacacagcttccgcactggaaggagtaggccttgatgcttatgttggatttatgcaccaagacaggccgggcagggtttcacttgctctggatttgatggaagaattaagaggtgtgtatgcggaccgttttgtactttcactcattaatatcaaggtaatcaacaaagatgattttttaaaaaaggaaaatggaaccgttattatgacagacgaagcaagaaaaaagtttctaaaagcttggcaaaataaaaaacaggaaaagattactcatccgtttctaggagaaaagatttcatggggactggttcctcatgcacaagctttgttgttggcccggtttttaagaggagatctagatgagtatcctccttttctgtggaagtaggtggaagattttgcttgttgtcattacttatgatgtgagtactttgaccggagctgggcagaaaaggctgagaaaagtggcgaaagtttgtcaaaactatggccagcgtgttcagaattctgtctttgaatgctatgttgatgcaactcaatttgcatctttgaagattgaactgtctaatattattgacccggacgaagatagcttgagattttatcagttggggaataactataaaaataaagtaatgcatattggggcaaaaccatctttggatttagaggacccattgatcttttagagtgcgaaggtgtagcgcacacgatttttcctgtgggttcgcaccataatattaaccaatattttacatatattggtcttgcttggtaaatagttctttgttttatcagaggaaatagcggaatttggttgttttgaaaacacacattcgcattttttgccaaattccgctgtcgctccctacgtgggggcgtggattgaaattaaactattgttaccagtccacccgccgacataagtcgctccctacgtgggggcgtggattgaaatcgtacgaggaaaacacgttcttactaagtggggagtcgctccctacgtgggggcgtggattgaaataggttacttttaaagtcgtaaactctcccgacgtcgctccctacgtgggggcgtggattgaaattttggatactgctggcgggactacgtcggataatgtcgctccctacgtgggggcgtggattgaaattaacagcttgttatcaaccgtgtttcctatacggtcgctccctacgtgggggcgtggattgaaatttgcctatgctgtacagactcataaaccgcggcagtcgctccctacgtgggggcgtggattgaaatcttatgatttaattatagcatgaatgtatttacgtcgctccctacgtgggggcgtggattgaaatgccgttcacctttagtgcgaacagcccttttgcgtcgctccctacgtgggggcgtggattgaaataagtatttttttgcgtgttgacgtgttggcggtgtcgctccctacgtgggggcgtggattgaaatcctttgttctttcgctataattctataattatccgtcgctccctacgtgggggcgtggattgaaatcacttagtactatgttaggcattatggtgacgtgtcgctccctacgtgggggcgtggattgaaattatctttttccgcgcaaatttagtgaacttgaacgtcgctccctacgtgggggcgtggattgaaatttcgctcatctcactgcttttgttgtaagtggtgtcgctccctacgtgggggcgtggattgaaattttaaccggtagcagttggcgtgcttcatcattgtcgctccctacgtgggggcgtggattgaaatcttacgaaatggaaaggtttgtaaattgaattcgtcgctccctacgtgggggcgtggattgaaatcggcatcaaagtaactaaagatgtagcggatcctgtcgctccctacgtgggggcgtggattgaaatttatcccttataacaatctttatggataagtgcagtcgctccctacgtgggggcgtggattgaaataaagtctggatgtgctgttctatctttttccgcgtcgctccctacgtgggggcgtggattgaaatatactatgcagcctggtatattccgggtcaaaaggtcgctccctacgtgggggcgtggattgaaatcgccaccagttatccagttgaaaaagggtcgccagtcgctccctacgtgggggcgtggattgaaattttacagtggatctttatgatgcaagcttgaatgtcgctccctacgtgggggcgtggattgaaattaatgtcagcgcggttgtaaatccagagccaaccgtcgctccctacgtgggggcgtggattgaaatttattacaaaatattaatccgaactcgagggaggtcgctccctacgtgggggcgtggattgaaatgtatatctccttgaagttccagtcgacctgcacagtcgctccctacgtgggggcgtggattgaaatgctcgtgcaaatggtgatggctggcggaattgctgtcgctccctacgtgggggcgtggattgaaataaaagtagatctgtacacaggatcccatttttacgtcgctccctacgtgggggcgtggattgaaattacggtgatgaaatgagagatttactccataaagtcgctccctacgtgggggcgtggattgaaatctgactcaaggcatatagttgcatgggtatgtctgtcgctccctacgtgggggcgtggattgaaatgaaccaacgctgaaataattccgatacagtgatagtcgctccctacgtgggggcgtggattgaaatatcttgcattgcctgttgctggatctcgatactggtcgctccctacgtgggggcgtggattgaaatcttgggggattccgtagcgcgtatagtcccaatcgtcgctccctacgtgggggcgtggattgaaatgtgcgagcatgtgaacgctttatcctcatcaattgtcgctccctacgtgggggcgtggattgaaataccgcacgctatttcgcctaatattggtacatatgtcgctccctacgtgggggcgtggattgaaatcaggcgctggtaccgtcaagttctgggagttcgtgtcgctccctacgtgggggcgtggattgaaatttataattttgttagcaggcgttcccaattgtccgtcgctccctacgtgggggcgtggattgaaatcaattgctaccgtcccaccattcatataccattagtcgctccctacgtgggggcgtggattgaaatccggccacagatacgctggttaacctgccgaaaggtcgctccctacgtgggggcgtggattgaaatccggccacagatacgctggttaacctgccgaaaggtcgctccctacgtgggggcgtggattgaaatctcagccggttcatcgtcttccacagcttctttcgtcgctccctacgtgggggcgtggattgaaatactccctcacattaaaaacttttgcacaaggctagtcgctccctacgtgggggcgtggattgaaatttccatatctttttccttcatcggatcaacaaatgtcgctccctacgtgggggcgtggattgaaatgccaatcccgcctgtagaattattccacccgtcgtcgctccctacgtgggggcgtggattgaaatcatgtacttttctacatctcggccaatcttttttgtcgctccctacgtgggggcgtggattgaaataatttcgccggcggtcaacagaatcgggcgaaaagtcgctccctacgtgggggcgtggattgaaatgccaatcccgccggtagaattattccacccgtcccgtcgctccctacgtgggggcgtggtttgaaatacttgtgattattacttataacattactttatatgtcgctccctacgtgggggcgtggattgaaatttttgataagccgtatggcgggtctgttacgacgtcgctccctacgtgggggcgtggattgaaatataaaggaaagtttgaacgatgaaggaaagtaccgtcgctccctacgtgggggcgtggattgaaatcgattccttgtatggctttcttagtaccagacatggtcgctccctacgtgggggcgtggattgaaatagtaggaggtttatgatgatacaaatttttacgggtcgctccctacgtgggggcgtggattgaaatattccctgtatatctacttgcaatttcatcgcgtcgctccctacgtgggggcgtggattgaaattttcctcaatctttttattttttctcctggcctcgtcgctccctacgtgggggcgtggattgaaatcaaacgttatctccaatatttttaagtttgtcccagtcgctccctacgtgggggcgtggattgaaatcaaactgcttgacgttgaccaggtcacgcggtcaggtcgctccctacgtgggggcgtggattgaaataaaatccatcgctgactttgtcgccagtccaaggtcgctccctacgtgggggcgtggattgaaatcttgtttatctttcgaaataagctccagaacgcaatgtcgctccctacgtgggggcgtggattgaaattttcagccaaacgtgactgcgaccggtgcgctctgtcgctccctacgtgggggcgtggattgaaataaacttggaaaccgtgatagcaacctcatcggagtcgctccctacgtgggggcgtggattgaaatcacatcaacgcggctttcggccggggcaacgatgtcgctccctacgtgggggcgtggattgaaattgatagtgaggttgcacagaacccactattttttgtcgctccctacgtgggggcgtggattgaaattttttcggcgggagccggcctgtccacccgcagacgtcgctccctacgtgggggcgtggattgaaatctgcatagcctgtttttccgtggcatgccagctgtcgctccctacgtgggggcgtggattgaaatcgggtcgatcaggtacacgtatgccttcgagttggtcgctccctacgtgggggcgtggattgaaatacgatgcctcaccttcctggtcgcgttcgatgatgtcgctccctacgtgggggcgtggattgaaatttctaggattaactccggaggatatgccgccaggtcgctccctacgtgggggcgtggattgaaataccttcccaatacactgtattatcaactgcaaaggtcgctccctacgtgggggcgtggattgaaatcccatcaagtaaaagcagttgaaaagctatcgaagtcgctccctacgtgggggcgtggattgaaatcgaaatgataagcaatcccattcttaatgtaaaagtcgctccctacgtgggggcgtggattgaaataatgatgctgactaaacgtgaccgcgccattattgtcgctccctacgtgggggcgtggattgaaatctgttgataaagccattggccaacaatcagcgcacgtcgctccctacgtgggggcgtggattgaaatcacagaagcaaaccaaatggcttccaggcttaagtcgctccctacgtgggggcgtggattgaaatcaacgtttcgcctaacaccgtcgcgccacctccgggtctctccctacgtgggggcgtggattgaaatctcctcgaagtaggcgacagcttgaatgacataaagtcgctccctacgtgggggcgtggattgaaatcttccgccaacttgcaaattatcgagattagtcgtcgctccctacgtgggggcgtggattgaaatagtattggaaaagtagccatgggatccgcgacaagtcgctccctacgtgggggcgtggattgaaatggtatcaaatccgtaatcttcgagagccttatttgtcgctccctacgtgggggcgtggattgaaatcgacataagctaataccgccggaatccctgccaggtcgctccctacatgggggcgtggattgaaatcagcaaaaaacaaaaccgtgggggccttaccccgtcgctccctacatgggggcgtggattgaaatcttttgataaatgcattgcacgaccggatgaagtgtcgctccctacatgggggagtggattgaaatgtgaatccaaaaggtagataaagaaacctatgccgtcggctccctgcatagggggcatgaaataaaacaacatccaccaaatagaaacaatttttgatcttttctaaaacttaacctttgatgcaacgcttggcattcccgatggaattgaacaattattgctgccagaagtgctgccggtaataattccggttcctactgttccatgcagccttgcatgcagctgcctggccagaaagaaaagagcccaagtcccgcctgcaggaataataaaacagaagcaagcagccctgcccaaaaaagattttaaagtttttcccattgaaggcttgctgagcgaaccagacaaagctttatctctggttcgctcagccgcaaaactggttgatgccgccttcttttttctttaaatccaaaaagaggcgcagatcgtgcaggcagcagtgacaaaccctctttgtgaaattgcccttgtttttatagtcccccgaaccgggtccagggcttttgcttattcagcagcccccgattatgtatttctgtcatcctcatcgtccagttccctgatcaaattccaagtctgataaatccggtttgccattttctcaggatctttcagcatcatttgatataaatccggttcatggctcaacgtctcaagcagtttcttttccggattactgaccgcttcatttgtcttcaggcccacatggttggtaaggcctaaaagataatcaatggatacttttaacacttgcgaaatccggtataacaccttaatagaaggaaaactgtatccagtttcgtagttcgaaatgttccggtcgcttaccccgacccttttcgcaagttcaggctggctgtagccttgagctgcccgcacttttttcaaacgggctgcgaatattgctttaacgttatccatgttttcattctcgtgatcggccatcgctactgctccttaaaaaaaatcaaaaaaaatggttgacttccaaaataattgtgtataatataagtgtatagaaattattttgttgatgagtgtctgtacaaagttgacaaagagccggagacacgaagaaaatagagcttcagcaaaaaatacccccctattttctcatgattcttacttgcagttcccaaattcaaagtaagagtaatacggtctccaggctctatttttacagtctcccttccagtttagcatgaaaacggtgcggttttaaccctttttcaaattgtaaacgttttcatataaaaatggcgggccaatgatccctgccattccatcttcattaatccacattgttgatgaacaaatccgtttctggcttgccatgaaccagctttcgcgtgcaaagaggagtccgggcaaagcggccagtttccttgccaaatccaggcacagcaacccctcaagcaggcagggcagctgcatgccgttgtaaaatttccatttcctacgggttcatgcaccaatcttgtcccggatttttgatgaaacaaattataaaaacgcatcatggcttacgttcattttcaaataacccagcccatgccggttccgttattcaaccggcatgggctgggttcctgtagcaatgggcaatcgttattctgaaaatgtctaaccctcattttattgcatataaatgcgtatttagattaatggccagaaatccggcgttttccggttcctctttgtaaattgtaatgcccgtgttgtcttgcgggatcatccggtaatttttaaacgggacttccagtgttccggcgacgaaaaagcggattgccatgctgtgggccacaacaaggacggtttcctccggatgtttttccaccagctcattgatacaggcacggacacggttatagacctggacggccgtttcccccgtataacccgcatgtgtcgcgcccggatcttgtagccatgcctcccaattatccgcatagtttacggaaaagtcttcctgccgttctccttcccaggcaccgaagtccgtttcgacaagacgcggatcttggtgtatttccaaattccgccccttcacgagaatttctgccgtacggacagcacggcccaatgttgatgcgtaaaccgcatcaaacggaatgtcctttaaaaatcctgccgccagtttcgcctgccgcacgccggtctcagacaaatcgatatcgcttctcccgcaatatctgttccggtcggcgttccattctgtctggccatggcgcacaaaataaaaaagtgtcataatgtacctcttttcacaaagtatcgactggttttattttagcaaattgaagcgtggaatgctatctcccgcggatgaccagcaaattgatgccggctatgcaacgcgaatgcgtcccgcccttcgctataaaaaatttatttgctatattatattaaaatattatataatggcaaaggacgctaaaacattggagaaggatgagttgttttttattttttaaaaacttcatatcatcgctcaattacatgtttatgtaaacgggggaaccaacgggtgctttgggcaccaggggtgaaacctttcattgaaaggtagggaaactctttattccctaatccgtcagctaacctcgtaagcgtctggagagaactgcgtgtgttttttggacacgccttttaagcaaaaatgctgcgaaggaatttctctctttcgtggttttttttcatccgcaaattcggtttccacatggaaatccggaaaccggtggtatctgcaatttgagttttacaaacaatctggtatgcagcttgcgtactgcgctttttgaaaaaatattggcatctgggagggacctacatgaaaagagtgagtttagcctggcagatttttatcggcctgattctcggtattgcgatcggcggcatttttcacggaaatgacaccgtggcccatattctccagccgtttggcgatttctttttgcgcttgattaaaatgattgtgatcccgattgtcgtttcaagcctgattgtgggtgttgccggtgcaggagatatgaagcaggttggaaagctcggcctgaaagcattaatctattttgaaattgtcacgaccattgcaattgtagtcgggctgctggccggaaacttgttccatccgggtacaggggtggatatgggttcgctggcaaaaacatcgatcagcagttatgtggaaacaacgaaagagacgcagcacaatggcatagtcgatacgatcttaaatattgtgccgacgaacttgtttgaatccctttcacaagggaacatgcttccaatcattttcttctctgtcatgttcgggatcggggtagcagccatcggggaaaaaggaaaaccggtgctccgctttttccagggtgtcagtgaagcgatgttttatgtcaccaatttggtcatgaaagtggccccgatcggtgtattcggccttattggcgtaacggttgcgcaattcggcctcaagtcattgatcccgctgagcaagcttgttttcacggtttacggcacgattattttctttgtggttgtcgtgcttggcctgattggctggcttttccgtgtaaatattttcaatctcttcaagatcctgaaagacgaattgatccttgcctattccactgcaagctcggaagcggtgctgccaaggatcatggaaaaaatggaaaaattcggttgcccgaaatcgatcaccacactggttattccgaccgggtactccttcaacctggacggctcgaccttgtaccagtcgctggcggcgctgtttatcgcgcaaatgtacgggattcatatgtccatcggtgcgcaaatttccctggtgctcgtgctgatggtcacgtcaaaaggcatcgccggtgttccgggagtttcattcgtcgtgcttttggcgacgctgggaacggtcggcattccgattgaaggcctggcatttattgcggggattgaccgtattctagatatggcaagaacagtctgcaatgtcgttggcaatacgctcgcaaccattattgtgtcaaaatgggaaggaaaatatgataaagaaaaaggagaagcgtaccttgctgaaatcagcggcggcgggcacgattccaaagatcacaaatatgtaacggaatcttaagatgagcataaagttaaagaaggtgcgttgccggaacaaggcagcgcgccttttttgttttcgaacgttctgcccgttgaaagaacaccggcagtgtgccctttttacatgtgcccggaaaaaattgtgcctctgtttccaaggattgttaccggccgggctgcaataatgagcaccccggggcacaaactattcacagcatgtattgatttttggagggataaagatgggcaaaaaaatgctgatgtgggcagcggtactgtccctcgctctttttccccggacggaacatgcggatgcggctttttggtttcagccgaaacgggccactgtcgatttgcgtttgttggagacatcggatttgcacggctatatgctgaattatgattatgccgcgcgcactgaggcggagacttacgggcttgccctcacggcttcactcattgcagcggagaggaaagcggcaaaaaatacgatgctgtttgatgacggggacttgctcgaagggaatgaaatggctgcttatgctgcccggcgcccgttaaaaaaaggggaagttcatccgtttatccgtgtgatgaaccatttaaattacgatgcggcgaccgtgggcaatcatgattttcattacgggcttgattttttgaaacagaccatcagcggagcaaagtttccgtttgtgaatgccaatatatactataatttcgaaaaaaatgatacagatgaccaaaattttttaaaccctatgtgattttgaataaaaaagtggaagaccggcacgggcattctcatcatttgaaaatcggggtcatcgggtttgtcacgccttctgtcattgaatgggaaaaaccgagccttggcggcaaagtcaaagcaaaggacatcctgcatacggctgcctggtttgtcccgagaatgaaggcggaaggagccgacctgatcatcgcgctcgcccattgcggtgtggatccggctgcaaaacaaccgttttatacaggggatgccgtatatttattaagcgaggtaaaagggattgatgccattctgttcgggcatcagcacagggtgttcccaagcaaattttttgcaggcgttcccggtgtcgatatccggaaagggacgatcaatggcgtgcctgcggtgatgcccggcaagtgggggagccatctcggtgtgatcagtctcactttggaaaaaaagggagagaagtgggaaatgacggaggcgcaatccgaggcgaaaccggtatatgccacccacaatcagcaggcaaaatccattgtcaggccggatccggatattgtccggatgaccgccgaactgcaaaaaaacgtactgggatccaagtttactttatatagccgaaactaatttgcccatgccgccattgttgcggcatgggtatttaagtgaaggaaaaagggggcaaattttaacatcaccgggttccagccgtggcgttctacaatttgcggcgaaaattataacgggcgtgcaggctccgtttgccgggaaacggggcgctgtcatacggtgtacgtttcttttcctttttgtaaaatttcttcgttcgtatctttatatctcagcatgacattgacatacagggtgtcgatgaggctaagctgtacgatccgcgcggaaaaggaagaaaagcggaaatctgcttcttgtgaaactgtaaataaagggacatcggctttctggcttagcggcgattttgcaaattgcgtgatcgcgatcgttttcgccccggttttctgaacggcctggagcaacttcagcatctctttgtccgcgcccgcgtgagaaatgaaaaccgccacatcttctttggtgcatcttgccgcactcaacagctgcagatgggggtccgtataagccgtgacagccaaatccgtctgcaaaaatttttcgagggcgtcaagggcaataacggacgcacttccgcagccgtaaaacacaatatgcttcgcacggcaaatccattcaacggcctcatgcaaatgtttttggttcaatgtatggatcgtatcctgcaaggtttggatattggattcaaacacttttatggcaactgctttttcattgtcggtatctttcactgcttcgtccatatttttcccggggcgggcggcttccgcagcgagcgcaatcttcaacgcctgaaatccgctgaaaccgatgcgcttgcaaaaccggaataccgtcgcatcggcaacaagcaactgatccgccacctggttgatcgtgctgtggaccaaacgctgcgggttctcaaggatgtagtctgcaattttccgttcttttgcgctaaattcgctgtacatcgtttgaattctatgaagacacgggaatgaatgcaattgtgtgcccatcttcaaacacctttcttgttgtgtcgtaccttctgtttttattttagtataaaatcttccttttttgaaaccgctgccataaaaggaatgggtcaagttttcttcgctcttgccagcaaacggggcaaccggcgatacttttgctgccgctgaaaaatcaatccagttgcatctccccgcaccaggcccgggttttctcatcatatttttagggaaaacggacggtgcaatcgtgtataataaaaatgatgcatcacgatgggctgatttgcaggcatcttttgaaatggcaggcggcaagcccgcaacatttcaaaaaaggaggcgtaaaaagaatgctaaaaagattgggcttgatttggttcatcgctatgattgcgcttggattcagcatgaacggggtggcaaaagcatctggcgataatagtacagtgatcgatgaaaaatacgggaaaccgatcgttgtaaccggtgcggcgctttctgcctcgcaaaaggcagaggtggaaaaggaacttggcgtggacgatgcaaacaatgtggaagagattaccgtaaccggcgatgatcttgtccattacattcctgacggcaaccgcaattcgaatatgtactcatccgcaaaaattacaagaacggattccggcggtgtccaggtgaatattgtcacaccggagaatattacagaagtgacagcggatatgtataaaaatgcgctgctcactgccgggattaaaaatgcggaagtggaagtggcttctccgctcaaagtaaccggccattcagcgcttgtcggtatttataaagcttacgacgattcaagtaaatccggggataaacttgattcagaccggacggaagtggccagccaggaactgagtgtcgcaacggatctggcgaaaaaggaagggttaagcaatgacaaagtgacccaacttcttacggaaattaagcaggaaattgcggaccagcatccggccacaaaagaagatattgaaaaaatcgtcgatgataaattaaaagatttaaacatcaatttgagcgattccgaccgccagctgctgtatgatttatttgaccagatgcgcaagcttaacatcaattttgactcggtcaaaagcgagttgagttccttgtcggacaaactgagcgataagatcaataaagcagccggagacaaagatttttggcaaagcgtaaaagactttttccaaaacatctttgacgcgatccggggattattccaataatggcaaagaaggcagtgcgcccctaatttccggcgttgctgccttctttttgttgaacatttttatctgtgctctggctgggagcagtctttgcaggggtgccattcttttccgtctcctggccggaagcaggttttgtgccagtgttgtccgattctgttccctcagcattctttgtttttgtatcatccgcgttttctggttttttatttttatttttattttgatccgtaaccttgccatccgttttcgcatcgtgctgtttttctgtatcctgtgtttctgttttcgctttatcctgcgtgccagcctttgctttatcagccgtaacaggcttgccgtttttttcttccttgttttgatcagaagtcccgcccttaagcagttgtgtcagctgatcggcctgttttcgcaacgtttcttcatcggaaccggaagtgtcaatattggctgcgccggtttccatcgaaaggtcaaggcccggcagatccgcattgtcggcaagctgttgatgggcaacaaggcggacgtttttcatgccgatttgtccggctttttccgggacgtaaatgctgccaaagtccacctttgtagcatcgtccttcatatttttcaattggatcgggccgggtgcattcatatggatcgtcaccggtccctcgggcgtttgcagcacttttgtgattttcagtccgtaaatggtaacatccgcatactgcaggcggagcatgacctgattttgttttattgctgtatcgcctgctgtaatctcgggcggaagcatcacgccttccacgcggtctgcttcaatgatgaagccgtctgttgcgggggattcagccactgaaatgtttgtgaaaaagcaaaaattaaatgcaataaatgcggctgtcaataggaaagattttgttttcttcacttgcctcaccatttctgtgtatagtctttatctttcttctgcactccctgcggcaatttcttccatcgtcccaacactagccggcacttcctcctgcctgattacccgccatgaaacagataaagacccgccgatgataccgagcagggttccaatgaaaaatccgcccatcgcccccatgatggaaaggacagacaggaaaatggccaaaatgccgaacaccatattaaacttcgggaaaaaataacccattccgccgatcagaaaaatcaagccgccgaaaataaggccgatcgacaccatgctaccgggcgcggctgcaatttcaagaagttggaccggcacatataaaatgatcatcccggagagcaacgtaaacgttgccccccagaatggccggcttcttctccagtttctaaaattcatgcgaaacatatggaacttgcccattatgatcactccttgaggaaaagcctattttttgacaaactgcactttgaggttcggcagatttgcgactttttggaaaagataatgtgtatccaggctgccgtctttgatcgttaaagtatctgccccttgcgtaaatgcctttgaagcagcttgagggtcatcggcagtgacataattttctgaaatattcatattggtgaagactgcatccccctgtacaagcgcagctttttgaattaccccgtcaaggtgtacaggtgtgcttccgtcgcctgccgtaattcttacctggtaatcgccgagaactggaatcttaacatcttttttaataaccaagtcttgaatcgtcactttatcaatttcattgacaaagactggcttgacatggtcctgccctttggaagggtccccatataaactcccgtataatttaaacccggtaccttgcatttccttgaatgaaacattgaatttgccgatgccgccgacagttgctgcaacggcaaccccgttaatgccgagtaccgctaaaagtccccccagaaaaataaggcctgaaagcagagcggtaaaaaaccatttttttgaagttctcccttgtaagactaatgccccttcgttcatgtaacaatcctcccctttaatacttgatcatttaaaaaagatggcatgaaaaatgttttggtgggaaaagttcctcctctccgaatggtatcgcttacatttttctttattttattcattttagacaaaaaaatatattcctattattgtagggaattcaacggcttatggcctacaaatatcgtatcggaaaaccggtttgatttttaacgcgaaaacccggcccgattatgataatattataggaaaaaacactggcaagggggtttagacgaaggagggagaaaggtgtcgctgtcattaaatgcgcatatgaacatggtcatgaaacacggggtagatcttttgcggtcgcaccagcagcaaattattgcggaatgcacggaaattttgcagtatttgagagaaacacataaaggcagcgcggatgcttttgaattcgctttcaattgttttgtcgcctttttccgttccggccagcaatcggttgaaacgctgattgacgatatccggtcgcaatgggtgaaggaattccgccgcccgccggaaccgcatgttctcatttttattttaaccctaattgaaaactctgttcataaagccataaaagaaagcacgacccggtcttttcacttgcatccttccgtccagtacctgttttcaaaaatttgtgaagaaatgctgctcatttccaaacaggaaacttttcatatggattcattttgtgagcagcttaccaaatccgaacagctccggattgagtggattgcaagggtcagccatgtggacgggggataccggctgaagaaagtgatcgggatggaggagaacgcgattgacaacgggctttttgaacgggtggatccttcatggttctggctgtcggaagcgctgctgaagcggacgccgcggcggaaaccggatgaaaggcgggatgtgtttccggtgccgtggaaaaatgagacgttgattttttgtatgagcgaccaggatgtttcggccaccatcccgtttttgacatatgcgatgcatttgttgcagatggaggaggaacggaacggaaaagtatatgcgggcgaccagtggaaagacgcagtcattttgtttaacgaatggattatgcgctcccaggatttaaatgaagcgatccaaaacatcgctttcggttacgcacaatatttgccgttcgagcgctgtgccctgttccgttattcgcaaagcgatgcggcgggattcggcctgttcggctaccattttaacaatacggcaattcggaatataaaggagacgatcgaccgttttccgtccatttctaaaatattgctaggaaaggggcagcaggtgaatatggtacagcatttccagccgctgtatatcccaaaagcttcagaagagtttccgatgcagtatgtgaaggagtttgagctggaatcggtcgtggtcgccccgatttatgtgccgtcagaaggggtgttaattggcggtgccattttggaccaggggcctggaaagttttttgaagtggacagcagcacatttacagcgctgttgaagttcggccagagcgcaggtgaactgctggccaagtttttaaaagcgaaccagtgggacgaaaagcagccggaacttgtccagttgtccgcccgggaaatccatattctgcagctcttggcggacggggcctcgacgacggaagcagcggaaatgctgcatttgagcgagtatacggtccgggattatgtctcaagcctgatgaaacgccttcacgccagaaaccggacggaagccgccgtaaaagcaatgcggctcggactgattcattgaattttgttcattttcctccgctccgcacttttttaagggaaaagtaatgatgcactcattttgcacgaaaaaaatgcaaaacgcccgcaaccccttattattaaaggcttgcgggcgcttcttttagcggccccgagaggactcgaacctccgacgcacggtttaggaaaccgacgctctatccactgagctacggagccgtaactttataatatccgttctagtcaccttaaatattatagtgaatctgccgttttgtgtcaatacccctgctttttagcaaaacacatggttcttcccgcaattcaattgccaaaacgctaaaagaagcaagtacataaacttttccgtaaaacgattgcggagaaatccaggcggaatccaggcggacaatcctgtcacacatgaaacatgctttacatacgatattgtaaagataggttcaattgtgcgaggcaacaggccaggttcttcattttccatgcgataatccgaccccttgtcatttgcatctgtcccacttagctttgccaggttattggggaattttccctgctgccggcaaaacggatggtttccatttgtgcaaaaaaacagggcgggaaagtaaccgtttctctttaaaaaagatatgtagaaattgagcatggttgaaaaggggtgaagcatttgtttaaactgtttcttgatccggggcatggcggaaaagacccaggtgctgtgggaaacgggatggaggaaaaagacatcactttggcgattgccaaacagattcacgacattctaacaaaccattaccgaaatgtttcagtgaaaatgtcgcggacgacggacaaatttgtgtcattgaaagaacggacggatgccgccaacagctggggcgccactttttttctttccattcatatcaattcaggaaatggaacgggttttgagagctatatttatcccgaagccggcatcacgacagaaacctaccagaaaaccatccaccaggaagtgctgaagctgaatgatttaaaagacaggggcagaaaaaaggccgattttcatgtgctcagggaatcaatcatgcctgcgctccttactgaaaacggctttattgacacggcaagtgatgcgaaaaaaatgaagcaaagcagctggattgaggatgtggcgcaggggcatgtcaacgggctggcaaaagctttcgggctcaaaaaaaaaaagcggtgaaacgtatcacaaagtcgttaagggggataccgtatacgctttaagcaaagcatacggctcaaccatcaaagaaattaaaaaatggaataatctggatgatgattataccatccgtgtgggggaaagattacgggtaaagtagccgtacaagcggcctttacccgtttttttcatctgaagccccattcatcctccgccgtaaaagccatatggtggtcaccggatcaccggtgcctgaatctgcaaatggccggttattctgttcataggctttgccgctggtcaagtccggggctcgggttattgggaagagcggcaacgggtttgtgcttttaatcgccctccgccatcctgtctgccgccataaaaccccaaacgcattaccggtgcctgaatctgcaaatggccagttataccgctcgtaggcttcactgctgattgacacctggtcccgtgcttgcggtggagctgtttcataataattttcctacacgctattatccgatctccattcttaaaattcccttaaatttttgctcaaaaaaagacggcacacaggccgacataaaaagagggggtaaaacagtgggtatttgtccagcatgcttcctgctctgctgtcctcgctacatgattgattgtaaaccggtgaccctaaaaaacaatgaaagcaacatcatcatttcatgaagtttcggttaaaaaaagaggaaaaccccgtacgcccggattaaaccggttttaattttcgtagccgtttacgatcagatcaagcttcccggtttccgggtcaatgacaagcccgtggaccggcacttttttgtccatcagcgggtggtttttaatgatgccgacactctttttcacgctgctttcgaccttttcgaaaccgctcagccattcgtcgaggtcaatccccgcatgaacgagtgtttcaatcgcattttcttcaactccgcgttttttcatattttcaaggacggtttcgccttttaatccggtcatgccgcagtcatagtggccgatcacaaacacttcatccgccttcagctgatagatggcgacaagcaggctccgcatcgtgctgtcgaacgggctcgttaaaatggcgcctgcattttttacgattttcgcgtctccgttttgaatattcattgctttatgtaacaattcaatgatcctcgtgtccatacatgtgaaaatcaccatccgtttgtcggggaatttggaagtcaggtaaggctcatacgcttttttctccacaaattcctggttaaatgcaagtacttcatctaacaatgtcatcacatctcactcctttaagcatattttaaaatacaatgacaggaaataaaagtatacatgttaaaaatgggaataaatccttcacattttttttgcgaaaaaacaaggggcgtgttacatttaattcagagttattttatgggaaatgggggatttgattgggaagggagtttgacgcgctgttcgatgaatggtctcgctcctatgatcaaaccgttaccggacatgatgccgaatacgaagaagtattctatcaatacgataaaattttggatgccgtcagagaccgggcaactggttttgttgttgaattcggcctgggaacaggcaatttgacgggcaagcttttggcaaaagggctgaagataatcgggatagaaccttctgccaatatgagaaaaatcgctcaaaaaaagcatccggatgttaaaataatagacggggattttttgaattttcatgtgcaggaaaaggcggatacatttgccagcacttatgcgttccaccatttgacaaacgaagaaaaaagggccgccatttcccttttccgtacccggttaaaggcgggcggcaaaatcgtgttcgccgatacggtttttgagacggaagaagcaaaacaggagatgatcagggaagccaaagcgagaggattctgccggcttgcggaagatcttgaaacggaatattacaccaccattcccgttttatcttccatctttgaggaaaatggttttgatgtctctttccggaagatgaaccggtttgtgtggctaatggatgcaaaaatgaaaggagcatgatcatcatgacagagatgaaaaaaatgaacgtagaaagctttaatttggaccatacaaaagtcaaagcgccatatgtccgccttgcaggaataaaagaagggattcacggcgatgtcatccgcaaatacgatatccgtttctgccagccgaacaaggaacatatggatatgccggggctccactcgctcgagcatatgatggcggaattcgcccgcaattacacggataaaattgtcgacatcagcccaatgggttgccagaccggtttttatttttccgttatcaatttggatgatgataacgaggtgcttggcatcattgaaaaaacattaagcgatgtattgaatgccacggaagtgccggcctgcaatgaaacgcagtgcggctgggcggcaagccattctttggaaggcgcaaaggaaattgcccggagaatgctggcaaaacgtgatgagtggacacaagtatttgcctgataacaggagacgagcgaaatgaaggttgcgaaaagcgtgcacgaactgatcggcaacacgccattggttgaattaaccgcatttgatctgccaaaaggcgtgcgcctgtttgcaaagctggaatattttaacccgggcggcagcgtgaaagaccggctcggcgcttatttaatagagcgcgcgtttcaggaaggcaggctgaaacgcggcgggacgatcatagaaccgacggccggcaacacgggcatcgggcttgcgcttgctgcgatccgttacggcgtgcatgctgtttttgttgtgccggaaaaattcagcgtggagaaacagacgctgatgcgggcgctcggggctgaagttgtgaacacgccgaccgcgcttggcatggctggcgcgattgcggaagcaaaaaaactaaccgctgaaacaccaaatgcgtatttcccgggacagtttgaaaacccgtccaatccggaaacgtattataagacgcttgggcctgaaatttgggaagcacttgatgggcatatcgatgtttttgtcgcaggcgccggttccgggggaacgtttatggggacagcccgctatttaaaagagaaaaatccggccttgaaggcggccatagtggaaccagaaggctcgattttaaacgggggcgagccgcgcagccaccgtacggaagggatcggcatggaatttttgccgccttttatggaccgcacattttttgatgccatccatacgattccggacgatgcggcttttaaacggcttgcggaagcggcccggcttgaaggccttttgatcggcagttcctcaggtgctgcgctggaggcgagcctgcgcgaagcaaagcaggcaaaaccgggcacgcatattgtcaccatttttccggacagcagcgaacggtatctcagccgcagcatttattcttgatgagaaggagtttgtgtcatgcgtaaaaaaacaaaattcattcatgcaggcatcagccgcgatccatttacaggcgcagtttcagtgcccgtccatcatgcgagcacattcaagcaggacggcgtcggccattttaaatacgaatacgcacgcaccggcaatccgacgcgtgaagcgttagaaaaactgattacagatatcgaagaaggcacacacggttttgcatttgcatccgggatggccgcaattacagcggtgatccagctgttttcagccggcgaccatattttggcaaccgatgatgtatacggcgggactttccgcgttttaacaaaagtgatgaaccgtttccatatcgacgtgacttttgtggacacgagcgatctggatgcggtccgtgcctcgatccgcccgaatacaaaagccatctacgtggagacgccgacgaacccgctgctgaaaataacagacttgcgggccattgccggtgtggcccgtgaaaacggcctgacatttatcgtggacaacacattcagcaccccgtattggcaaaatccgctcactttaggggcggatatcgtcgtgcacagcgcgacgaagtatctcggcgggcacagcgatgtggtcgcaggccttgttgccgtgcggaacgaggcgcttgcagaagacttgcattttatccaaaactcaaccggcggcattctcgggccgcaggacagctggctgttgatccgcggcattaaaacactcggcatacgcatggaagaaattgaatccaacacaaagcaaattgttgattttcttgccgcacatcctgccgttgaaaaggtatactatccggggcttgcccatcatcccgggcataaagtgcacagttcccaggccggtggattcggcggcatggcctcttttacagtggcatcccaggaaaaagcccttgaaatattgaaaaaaacgcgttactttactttggcagaaagcctcggcgcggtggaaagcctgatctcgctcccgccgcttatgacgcatgcatccattccgcgtgaacgccgtctcgaacttggcatcgaagacgggcttatccgcatctcagtcggcattgaagacgtcgaagatttgttggaagatctggaaaacgcgctaaggtaaaaagtcagcctgctctcatgggggagcaggctttttgtaacggtatcaatggcggatgccgctctgtttcctgtcgcctggtctggaatgttcaccatacttttgcccgctgtaaaacatcaccatcgtgcgaatccgcagcggcagctccacagtttaaaaaaatttcctctttcacgaaacttaaagcatttttaaacgtaatgattagtaagcaattatgtccggcgtcatctgaaagaaaatcccaatcaaggaaagggtggaatgtttatggaagtgttcggcgtgccgatagagacggcgtatttggctttgctgattatggcgggatgcctgacggtgctttacctgttgttcaatgacttgctcggcggaattgcagacgccatccattttatccatccagccctgattttggcattttttacttttttctcggcaggcgggtatattttggaaaaggtgacaccgctttcccacctgctgatcatggccatttctgccgtgatcgcggtgattcttgatatcctgctcaatgtgtttgtgcttgtcccgctgtcttcggctgaggaatcgcttgcttatacggaagaatccctggaaggaagggtcgggaaaacgattctttcgattccgaaagccggttttggtgaagtggtgattgacagcaaaacaggaacgatctccaagccggcagccagcatacaggatgaggaaattaaagaagggacgcaggtgttggtgattgaagtgaaaaatggcgtgttatatgttgtgccctatgagaattatcgtttgaaaattgaaaattttagacaattataaggagggagccgcatgtttgcaagcggaatttggattgttatcggggttgttgtgtttttggtgattgcccttatcggcgtttttattacaaaatatcgtacagcagggccggatgaagcattgattgtaacagggagttttcttggcggtagaaatgtccatgtcgacgaagccggaaataaaattaaaattattcgtggcggcggtacatttgtgtttccggtattccagcaggcaaaaccgctcagcttattatcgagcaagctggaagtgaccaccccggaagtctacaccgaacaaggcgtcccggtgatggcagatggaattgccattattaaaatcggcgggtcgatcggcgaaattgcgacagcggccgaacaatttctcgggaaatcaaaagaagaccgcgaaaatgaagcgcgggaagttttggaaggccatttgcgctcgattctcggttcaatgacggttgaagaaatttataaaaaccgtgacaagttttcacaggaagtccagcgcgttgcctcgcaggatctggcaaaaatggggcttattatcgtgtcgtttacgattaaagaagtgaaggataaaaacggctaccttgatgcgctcgggaaaccgcgaattgcacaggtcaaacgcgatgcggatattgccacggcagaagccgaaaaagaaacgagaatccggaaagcggaagcattaaaagaagcaaaacgtgcagaactggaacgggcaacggaaattgcggaagccgagaagttcaaccagttgaaaattgccgagttccgccgcgaacaggatatcgcaagggcaaaagccgaccaggcatacgatttggaaacggcccggtcgaaacaggaagtcaccgcacaggaaatggaaatcaagatcatcgagcggcaaaaacaaatcgagctcgaagaaaaagaaattttgcggcgtgaacggcaatacgactccgaagtcaagaaaaaagcggatgcagaccgttattcggttgagcaggccgccgttgcagaaaaaacgaaacaaatggcagaagccgacgcccacaaataccgggtggaagcgatggcgaaagcggaaggggaacgcgtccgcattgatggtacggctaaagctgatgcccagcgcgcccaaggggaatcggaagccgaagtcatccgtctcaaagggctggccgaagcggaaacaaaacgaaaaattgcggaagcatacgaacagttcggccaggcggctgtgctcgatatgattttgaaagtgctgcctgaatatgcgaaacaagtagcggccccgctttccaatattgaccaaatcaccgttgtcgataccggaagcggcgcaaacggcggtgcaaataagatcaccggctatgcaaccgatttgatgtcgaccttacaggaaactttgaaagcgtcaagcggcattgatgtccgggaaatgctggaaggcctttccgggatcaaactgcaacaaacagctgaaccggaaccggcagctttggaacaaagcacaaaagggtgaaaaaacggcgtgtttctgccaaattaaaaggcaaaagcacgccgtttctttagaaaaacaaatgtgtccggttattttccggcccccgcagtcattttatggatgaactggagggagcggcctgcgccgactacgacggattgcagcgggtttggcgcgagatggacaggcacggaaatttcattgctcagccattcctgcatgccttgaaggagggcgcctccccctgttaaaacaatcccgcggtccacaatatcgccgcttaactctgccgggcagtcttccagtgtagcccggaccgtttccaaaatttggagcagggaatcgcggagcgaagcctgaatttccaacgaacttaaggtgatggttcgcggcagccctgtcacgagatcgcgcccgcggacatccagcgtttgttccggatggtcgacaagggcatgcccgatttccattttaattttttccgctgtccgctcgccgatcagcagattatacgtttttctgacatgctgcataatatcatcgtccattttatcgccgccgatgcggatcgtgttatacgtcacgacgccgccgaaggaaataatggcgacttccgtagtgccgccgccgatatcgacaatcacgttggcgatcggctcgtccacgggaagatcggcaccaatagcggcagcaaccggttcttcaatcaaatggacggtttttgccccactgtttttgacgacatcttcaatggcccgccgttcaaccgatgttgcgcctgatgggacgcatactacgacgttcggtttgcggatcgagatgccgctttgctgattgatttttttcataatttgtttcagcatttctgttgtcatatcgaaatcagcgattaccccgccttttaaagggcggatgacagtaattttttcaggtgtttttccgatcatcgctttggcttcctgcccgaaagcgagcacctgccttgtcgaatggtcaatcgccacaacggacggctcgtctaaaataacgccttcttttttcgaatatactaaaacatttgcagttcctagatcgatcccaatttcattccctgaaaacatgcatgtcacctaaccttcatcgtcttttcgctcggattaacagtagtctctcccatttagtatagctttttttgttcgttctgaaaggttacattttcttccattctcttatgttacaaaaatatgatcgcggcaagtccataaaatatgcgaaaaacagcttcagccggcaccccaaatttaatctttttgtaattttattcacaatggaggacaggaaaaaattcctttttgtttcaaaaggaattttttctaaacaagaatcacagcggcatttttgacaaatagcgcgccaattcttcactttgttgtttccgcagcacccgctgttcggcgcgctggatggccgtttggtttaaccatcgttcctcatcggtttccgggatgatttccggcaccggtgtaggttttccatcctcatccagtgcgacaaaggtcaaaaaagaaatggcggcaatttttgtctcttctgttttcaaatcttccgcactgacctttacaaatacttccatcgatgtccgccctgtccggctgaccatggcttctactgtaacgacgtttccgacgcggatcggtgcgataaaatcaacggagtcggtcgaagccgtgacaacggtgcatcttgccaatttggccgcggcgatcgatgcagtatcatcaatatacgccatcagttttcctccgaacagtgtgccaagatggtttgtgtccggcggaaaaacataactggtccttactgtgcgggtttcccgcatgtatttcttcggtctgtcttccaaaagtctcactccaatatgtcggcgctgtcaaacgcgattcaaatttccttttatcatataaaaattatagcaaaatcagtcggcatatacgaacgaaaaaaggctttcatccggaattttttcaaaagaaaaatcaggcccggcacctcaacctgatttttgcatgctcatttcttttttttctcgtcttccacataaggatctttttcgtttcggggcagatccccgaacggcgtcatcgtacgggtttcatccaattcttcttcgtattctttgtattcctcatttggatagatttccacgtttttcccgttgatgtcattgccggaaaagttttcgaaatcttccacatagccgtcatggtcatccgattccgtatacatatcattgtaactgtccggcggggtttcaaaatcggaaggggactcggatgtgccccattttgcgacagcctgccaggcgtcttccgcgtcaaaagcgaccgattcatctttgcctccatcaaaaacgaattttccccacggtggattcagcacgtcttcttcaaccgggcggtgtcttggaatggtccggtccggggtgtgctctttgcagtacagcgtggacggaagggtttcaagccgctcaagcgggatctctttgccgcattctttgcatcttccgtaagtgccgtcctcaatggctttgagggccgctttgattttttcgacttcatattcagcatggtcatttaaggcaatatctttttcccgctcaaacagttcagtaccggtatcggcgggatgattatcgtaactggacagttccccgacagaatcgtaaggaggtgccgttcccgtttggaaatggccgttttccccgaattcctcttcaaattctttcagctgcgcggttaaaatggaacggaaatgcgccagttgttcttttgtcagcatattcaccacttctttctaaaaaaaagatgggttcaatcgttttagagtctatttaccaccgggaaaaagcccgcaaacttttctaaaattagtatggatcaaaacactgctgttcatgaaaaaaagtctgcccgtttaaacagacagacttttttagcctattgtgcatcgatcatgcccgttttcaagcagacaggcgtttcttttcatactgtcggaacatcagcacatacatccccgcgctcattaccgcaagcacggccaggatggaaaacgtccatttatagccgatccaaccggcaagcgggatggaaacaggggcaatcgtgcgcccgattgtattgcgcaagcttgcggcggcaaaatattgcgcgcgcatttcaggcggggaaagcttcgaaacaaagtcctgctggattccggtcacaatcagttcgccaagcgagaacaaaagaatcgagaaaataaagccgatgcttgaaatccagacgccgaacaaataaatcgaaacggcatacaggagggaggagaggacaaacacattccgctcccggtacctcgtcacccatttcgtcgccgctactgaaaaaagcgcgacaatcagcccgttttcggataaaataaaaccgtacagctgctcgccggtaaagtggagcagatggagcaaatctgcttcaggaatggcctgcttcgtaaataccggcaaaattaaatcaagctgcatatatgtttgggaaatcaggattccggcaaaaataaacaacataaatattttatctttaacaatcacctggtagctcttggcctgttccatcagcgtactgtaccattttttacggacgcgctgctgcccgcctgcccaaaccggtgctgtttcgcgcgtatatttgacgagcagtgcgccaagcagaaaacaggaaagagcggcaaaaacaagcagttcaaaacggtaatccgcaaaaaatatcccgccgattgccgggccgatgacgacggaaatgttcatagatgtataaaaaacggcaaacacatggctccggtttttctcatccacaacatcggcaatcattgcctggcttgccggataataaaaagaaccgaaaacgccggcagccgtaaagcaaataaaagctgtcacggcggaatggaaccatggcgaattggcaaatccgaaaatgaaaaaagacacgccctgcccgattgaggccacgaccatcattttctttctgccaaagcggtcggcgtagtatcctccgagcaaattggcaatgatggaaaaaacttgtgaggcaatcagcaggacacccgcaagctcggccccaaacgcctcggtgaaataaatggtcagaaaggggaaaaacatccaaaaggtgatattcatcaaggattccccaagcaggcggacttttaaattttgatcccagtcacgtattctcataaaaatttcctcatctgtccagaattggtatcaaccctatgataccagaaaaagcggggaaaacaatgaagaaagttacaggaccgggcaaggcattgaaagggggattgccagatgtaccggataaaacgaatttatgaagagcccggcggggacggcaaacgtgtgctggtcgaccgcctctggccgcgcggcatatcaaaagaaaaagcggcactcgatgcctggatgaagacagttgcgccgacgggttccctcaggaaaaaatttaaccataatccggctttttttgctgaatttgccgcgctttataaggaagagctggaccgactggaagacagaacggaactggaccggctgatcgaatggggaaaggctggaacggttacattgctctacgcggcaaaagacgaaaagcacaaccaggcggtggtgttaaaagaatatctcgaagaacggtcataatcgaaaggcgccgcatacgctgcggcgcctgttattacgggttgtgcatgcggtttttaaaccttcgtgcggaaatgtttgctcgtcgtcatagttgctgtctttatgctgcttttcaccggccatctggtctttcggaaaacggcccgggtggccttttcttttgtggccaaacatttctccgcgtcccatccttgttcccccttcctgcctatagcgtcccttaaacagaaggaaatatgtacccgcatgcggtataatggtaaaaaagcgaaaggggtgccgaccttggatttcatgagaatgacggaagagaaaatccggagagcgtatgaagaagggcaatttgaaaatctgccgggatacggaaagccgctcccgaaagacccgctttccggcgtgccggaagatttgcggatggcttaccggattttgcagaacgccggtttttccccggaagaagccaatttaaagaaagaactgctttccattgaagatttaatcaagcagtccgaaaatgaaatggaaaaagaaggattgcaaaagaaactgagcgagaagctgctggcgtacaaccaaatgctttccaaaaaacggatcaaaacaaacagcgccatgtttaaaaattaccaggataaaattgaaaaaaggctgtttgattaagggacgccgcgaacagaaccggaagtggggccggtttctgcgcaagaagcgggaagcccgtttaaaaagcaggtttggtggcgttctggagcgttacagtgcgccgttaatttgtaattgcttactaaatccaggggaacggaaaccggctgcccctttcaccgggcgtttaaaaaccgcatcatattttcccgcttttttactacaaattgccgccatccatccgatataatgaaagaagacattatgatattcaggtgaaaaaaatggataaatcatcaattatcggcgtaattctgggtgttgcggcaattggtaccgggatggtgttaaaaggggtaagcccggctgtcctcgttaacccggctgcccttttaattatactggcgggaacggctgcgaccgtcattatcggtttcccaatgagtgaattgaaaaaaattcccaaactgttgaagattatatttacggaacaacaactgatgagcacggaagaaatgatccgctttttttccgactgggcccagactgcccggagagaagggctgctggcacttgaagcaaggctggacgaggtcgatgacgcttttttgaaaaacggcctgagccttgcgattgacgggcagagtgccgaatatatccgcgatgtgctgagcgaagagatcgaggcaatggaagaaaggcatcagatgggggctgccattttttcccaggcgggcacatatgccccgacactcggggtgctcggtgccgtattggggctgatcgccgctctcggaaatatgtcggatacagaagtgctcgggcatgccatttctgccgcattcgtggccacattgctcgggatttttaccggctacgtattgtggcatccgtttgccaataaattaaaacggaagtccaaaaacgaagcaaaaaacaaggaaattatgctggaagggattctctccatcctggcaggcgaatccccgcgcgtgatcgaacagaaactggcgtcttatttgccgaatgaagaacggatcaaactgatggaagagattacagaaggcagcgtggcaacaaatgagtaaaaagcggaagaaaagacaagaagaagagggaaacagcgaggcatggctcctgccttattccgaccttttaacattgctccttgccctgtttatcgtcctgttcgcaatgagttccatcgacgcccagaaattccaaaaattttctaaagtcttaaacggcgtgtttgtcggcgggacgagctttttcgattatacgaagcagacatccggggatgataacggcacatccgacacagaaaaatttctcgagcaaaagaaaaatgatgcacaaaaaaacggggacagcacaacgaatggttcaaaaagcaacagcacaacagatacatcaaatgggcaaggggatgcccaattaaaagaaacccagcaaagaatcaacacgtacatagcgcacaataaattggaaggaaagtttaaaacgtctttgacaggcgaagggcttttgattacgatccgcgacaatgtcctgtttgattcgggaaaagcggaggtccggaaagaagatatcaaaactgccaaagccctttccaatttgctcgtgatggacccgccaagaaacattatcgtcagcggccatacggacaatgtgccgatccataactctgttttccaatcaaactgggacttaagcgtgatgcgcgcaaccaattttctaaagatcattttagaaaataaaaatttaaatcccaaatatttttcggcaaaaggatatggggaataccatccgattgcatcgaatgatacgcaaggcggccgggcaaaaaaccggcgggtggaagtgctcattctcccgaaaaatgagaaaggaaacggccggtaaaaccggaaaaaaagcgtcccggatccgtattttccaatcgttcgatgatcccgtgaagcgtatgtgtaaaattttaactcaagcagcctgtacgcccgtcagtgggcgtaaagcacggatcagttgccctgcattcaagcagttcatcggcaatgggacatttaagcaaaatattagaatattagagctttcgttttaagcttggctcagtggggactgatcgttgaggcgcgcgaaatttacgagactcctgcgggaaaagcgagccaggagagaccccgcagcgaggtacgagcgaggaggctcgccggccgcccgcggaaagcgagtgaatttcgcgcgcctcaacatccccgttgtccatctttatacggaaatatcacatcttttccgaaaattacaccgagcaagtgaagcacggtagccgaaagtgtacaaaaagagtgtcttggaatacccgatatttaaaccttgtcgagaaaaacttgacacatacccgtgaagcagactatttgtttaaaaccgcacaaacgaggtaaaatataaacgtcccaaagattagaaaaggagatggttcaattggctaaaaagatcgctgtacttgtcaccaatgaagtggaagattctgagtacaccgaaccggtgaaagcatataaggaagccggccatgaaattgtcaatattgaaatgagagccggaaaaacagtaaaagggaaacacggcaccgaaatccatatcgacaaaggcatcgatgatgtcagcgtggatgattttgatgccctcctgattccgggcggcttttctccggaccagctccgcgccgacgatcgctttgtccaatttgtaaaacaatttatggattcgaaaaaaccggtgtttgcaatttgccacggcccgcagcttttgattacggcaaaagcattggaaggccgggatgccacaggttacaaatcgatccgtgttgacatggaatatgccggcgcgaacttccgcgacgaagaagttgtcgtatgccagaaccagcttgtcacaagccgtacgccggatgacatccctgcatttaacagggaatcgctgaaaatcctgaacggatgagcttttaagtgaaaaaaactgctgcctctttccgggcagcagtttctttactttgcgcacaatgcaaattagggatatgataaatggagcggggaaacagaaaatgaacctttacatagaataatgttgccataacgaaaggaagtcggacgatgattacactgaaatcacaaagagaaattgacatgatgaaaaaagcaggcaaactgcttgccgatacgcataagcaaatcgcaaaaatgatcaagccggggattacaacatgggaaattgaggaatttgtcgaccaatatttaagagagcacggggcaacccctgagcaaaaagggtaccagggctaccagtatgcgacatgcgcaagcatcaatgatgaaatttgccacgggtttccgcggaaaacgccgttaaaagaaggggatatcgtcacgattgatatggttgtcaacctgaacggcgcgctggctgattccgcctggagttatccggtcggaaaagttagtggagagacgaaaaaactgcttgagattacaaaagaggcgctttataaaggaattgaacaggccaaaccgggcaaccggatcggcgacatcggccatgcgattcaaacttatgtggaagcacagggattctcggttgtccgtaattttatcggccatggcatcggcccgacgatccacgaaaaaccggaagtgccgcactacgggctgccgcataaagggccgcgcattaaagaaggcatggtgttcacgatcgagccgatggtcaatatcggcagctacgaaacgaagatggacgacaacggctggactgcccggacaagggacggatccctttccgcccaatatgaacataccattgcagttacaaaagacggcattgtgatcattacggatcaggaagattaatgctgcactgaacccggatccggctggagtgctgcacagcgccggaaacctaaaaaagctgggaggaataaaggctcccagcttttttacattccgaaaccggccggcattaatcttttttcaggctaccgagctcttccacgatggcttgcatttcattcgggctgaatgtattttttttcatcaccatttcgtacaaatcaaacaaatcgtcataatggtcaatgctaaactgggacgactgcagtgccgccgtattgaccatttttaatttcgctgtgattgcttgcaccatataagccatattttgcgctgttttttctgaaagatccaacattttcacccttttcgtgtttttcatgtttttattataccgcatggcgtgccatccgaaaaacgtttcatacggaacagagagggaaatataatggtaaaccggacggacagagggtgatgaaaattggataaaattgaactccaggcagaaaaaaaacgttcaaccattgcggctttgttagagaactcaaaacggaacgatattaccgggatggctgcacagttatcctacttttttcttttatctctatttccgctattgatttttttgtttaccttgcttccttatttgccgattaaatcggatgatgtgttgaatatggtcaggcattttgcgccaagccagtcgtttaagctgatcgaaaccaccttgaaagaagtgctgaccaaccggcacggcggcctgctttcttttgggatgatcgcgactttgtggtccgcttccaacgggatgaacgcggtcattaaagcattaaaccgggcttataaagtagaggaatcacgctcgcctgtcatgcagcggctcatgtcggtgatactgacgctcgggatgatcatcgtgtttatagctgttattttaattcctgttttcggtgagcaactcatccattatgtgttttcttacttcgggctgccgaatgatttgaaaaatatgatcaatattttaagatggatgctcacgccggtcctgctgttcattgtatttgccttgttgtacttttttgcgccgaatgaaagattcggctgcctgacggttgtccccggagccatttttgcaacagtcggctggattgtggcgtcactcgctttatcgttttatgtcagccatttcgggaattataatgccacatacggaagcctcggcgggatgatcatcatgatgctttggttttatattagcggcatcatcctcatttttggcggtgaactgaatgcagttttaaatgataagcgcaaaaattgctaatttggataactgcttttaagcgcatattaaaaaaacggcaagttgccgtgccatcttaatgaagaaacgaagcattctgagtgaagaagggcgttccaaattccgcctgttttacaagtgaagacaggcggacaaatagggaaagcagtctaaatttcgcgcgctcttaacggagagatctcccgggttaagagcacggccggtttttccggtaaatcttatccccggcaacccaggcagccgattttggcggacaaaaggcaaagttaccgggtcttcaaaacgtgcacggcagcacgcagccgttaggagtgccgggggacgggggcgggcgtttttttgaaacggaaaatcaaaacggacaaaacaaacaatatcatgcaaatcagcaggaaaaatacaggtccatttgtatatttaatgatcacgccacaaagatacgggccggccatgctgccaaagctgtacagaatgccgcacatgatgttgccggcgggaaggagcggccgcggcagcagatcggacaggtaactgatcccgagagaaaacgtcgagccgacggccataccggcaacgaaaaagcaagcaaacagcgcgatgacgtttgatttgctaaaagcagcccccgcaaaacaggcgcagccgatcaaaaggaccgcaatcaacacttttcgccttccgagccggtcgcttaacatgccgagcggaagctgaaaaacgatgcttccgatcgagaaggcagggataatcatggaaacagcatcgacatttattccgtttcttaatgcataaaccgggaaactgctgtttaaagacgattccatgaatccgtaaccgagcggcgggagcaatgcaacccacgccagtttccagaccttaccaaagcgctgaaatgtggccagaaaagaaacattttccaaatctgcttccgggtgctcattttttaaaagaaaaacggccagccagaaacaaaggctgatgatggagcaggcaataaagggaaggcgctcatccacatttacaagccttgtcatatacggcccgacggcaaatccaaggctgaaaaaaagcccgtataatgcaatgttccgcccgagctgccctttccgggagaaagacgtgatccatgtctgcgccgaaaaattcagcatatggtctccaatgccgatgaaaaggcgcaaaacaaaccaaaaccataacgatttccaggccggaaataaaagcagtgaggcaaatacggtcagcccgcctgttaaaataagcggcttatatccgaatttccgcagcggcgcttccatgagcggggatgcaaataaaacgccgatatacaggccggttgcattcagcccgttcaatgatgcatcaattccatctttttcaaaaataatggaaatcagcggcaaaagcatgccctgtgtaaatccggaaacagaagtcatcaataccaaaatccaaaaacgcatattttcataacgattcattgctctcacccggcttgttctcgttgtgcattcgctctctatagcatattcagatcagaaaaatttggcaagccaaccgttcttttgtaaaattttatagaaagcagataaggaggatggccatgaataaaatgtttgccattatggtgatgatcggggttcccgtctcggttgctggagcacttttgcactggccgaacgttttgatgtttgccgtttactgcctgaccatcattgcgctggccagttttatgggccgggcaaccgaaagtctcgcgattatagcgggtccgcggatcggcggcttgttaaatgccacattcggaaatgcggtggaattgattatttcattgttttcccttgcggccgggctgcaccaggtcgtgcttgcttctttgacaggctctgtgctcgggaacttgctgcttgttgcaggcatgtcgttttttttggggggcctcaaatacaagcgccagaaatttaacgtgtatgatgcacggcataactcaggccttttgattttcgcgatttttgtcgcatttgtgattcctgaaattttttccatgaatatgtcagaagggaagacggtcagcctcagcattggcatttccattattttaatcctgctttacttgtttgccctgttttttaaactggtgacacaccgcgggatctatcaggacagggaagcacgggcccagcagaaagaagaacatgaagcgccggaatggtcaaaggggaaatcgatctttgtgcttgcccttgcgacgcttgcagtggcctatatttcggaaaatctcgtacatacttttgagtccgttgcaaaaagtttcggatggagcgaaatgtttatcgggattatcatcgttgccattgtcggaaatgccgctgaacatgcttcggccattttaatggcggtaaaaaataaaatggatattgcggttgaaattgcattcggctccacgctccaggtgtccatgtttgtcgtccccgtcctggtgctcgcatctttgttttttgaaaaagccatgccgcttgtcttttccataccggagctggtctcgatgatcgctgcggtcatgcttacgatcattttagcaaatgacggggaaacaaactggtttgaaggtgccaccatgctggcagcctacattatcatggggatcggtttttacttgctgtaattccggaatcggtatccatcatagccggaaaaaatgcgtgcgatccattaacgggatataggaaaatcgggttgcagtaacgccggaagcttatgtccattataaatggaagcaatatgtgtgatactttgacaaatactggtgaagctcatgcatcgggataaaaggaacacggggtatctgcaataacgccggaaacttgcggcccgttataaacgggagtccagcggtgaaccggagttttttcagtaacgccggaagatattgccgtgtgaagcgcaaaatacgctggcacatcgcggcggagtgccgtgatgcatgtggcataaaggagccgggttttatttgcatggaacggatattttaatccgggcaggaaaaaataacggtacgttcgtaacctcttgtgaaaggagacaacatcaatgaaatggatgcggacgatcctgattttcctgcttgccgtactttttgctgtgccggcaggggaagcaaagccggcagataaacaggtgcaaattccacagtcggtcctaaacattacaaaagaaaatacgtatccgaactcgtcgcaggatctgccttacttgcagccgagcaagtttaccgaaactttgctgaaaacatctaatgtcagaattgaaaacccgaatctcgtgcggatgttgaatgaaacaagcgtgaaccgttcgtttttatcgctcggcttgcgcgcgaaaatttatctgggcgaatggccgctgaattatgaatccagcgaaacgtcgccaaactggcaataccaaaaaatcaatacgaactactttgataaccgcggcggcgatgccaattataaaatgcactatgtccaggaagcgcaaaagatcgtgcgcggcggcctgactgccaggattccgcaagcggacgatgtaaagaaaatgatgctgttaaaagcaatggaaaactcgaagctgccgctttcctttgacacgattatcggagccggcacgaaaaaaggccatgaatacaatgtcccggcaaaacggctcggctatttgtatgcttatgcaccggccgtgaacgaaaaaggaaaagtgacatacggcgaagtgtaccttgtccttaaagggacgaaacgggaaattttggtgaaaaacgtcacttcccacggcattggcgcctggattccgattcaggactatgtttcgttcggcttttccgtgagcgaacagccgaaataaggaagtttattgggcaggttcgccggcttctgaggaggcctgtctcacgctaataaagaaaaagctgtctgaacggcagcttttttctgtgccgaaaatggggtatactataataagaaagaagtacgtgaggaggatttttttggggaaagcggtatatgacaaggaccagcaacttacttatttaatggaacggctgaatatctttttggaggttctggattcgattgatccggaagcggcaggccttgaagatattgaccggcttattcaaatgatcgatgaaatcgaaatgaaaatggaccaattcaaaaagcgcaaaccggccccttctttgtaaaggccggttttttatctggcatcgggggacgactgctgttttggaacgatattgccctgttttcctgcacgaacagatactgccagcatttccggctgcagaaatgagaaagataaggaaaacaacaaaaaggagtttggttatgagaaaagtttttgcaacactttttgcagtcttcctgtttttttcaatatgcccgcagcgagatgcttttgccctttccaacgccccaatcaactggggatttaacaaaggcaaaaacgggcagcaggcggatgccggcgccgcttataacgcccttttgcaaaaatacggcggcatttacaagggcaatccgaatgacaagtatgtgtatttgacgtttgacaatggatacgagaatgggtataccccgaaaatactcgatgttctgaagaaagaaaaagtccctgccatctttttcgtcaccggccactatttaaaatcacagccggatcttgtgaaacggatggtgaaagaaggccatatcattggcaaccactcatggagccatccggacatgacacagatttccgatgcacaagtacgtgaagagttggaaaaagtgaaagcagaaaccgcccgccttaccggccagaaagaaatgaaatatttgcgcccggcccgcggcatcctgagcgaacggacgctgaaactgggcaatgaagaaggctacacccatgtcctttggtcactggcttacctcgactgggatgtgaaccgccagcgcggcacacaatttgcctatgacagcatcatgtcacaaatccaccctggggccattattttgctccatactgtgtcaaaagacaatgccaacgcattggaacgcgtgatcaaagacttgaaaaaacaaggctacaaattcaaaagcatggatgagtttatgaaaaccgaaaaattgaaaaagtaaccaaagagggctgcctgaaaagtgggcagctctgtttttcttgccggaacaggctggtttcttgccagaaggaaaagggcttgccgggttgggttgaacgaattggaaacaattgtgccggctgatcttcattcttctgctggccgcgttcactgcagcatgggcgtctattctgaaatatgcgccggttgatttttatttttccgctggtgctgctttcacagcggcatgggcgtctaattagacaaatgctcgcgcgggtctgttgcaattgtctaattggcagctttattagacaaatagccgggcggatcacctgcatttgtcaaattggaaacgctaattaaacaaatgagcacgcaaccctcctgcaattgtctaattggcagagctctaactggacaagtgctcgagcagcccttccgcttttttctaattaaaaaggctaattagacaaatagccgtacagctcacctgcgtttgtccaaataaaaattctgattagacaagtaacaggccgggtctctttatcttgcgttgtttttcatgcgcgttgaatcggcaatgaaaagggcgagcgcttgtgctataatacttaaaaacgaattgagaggacgccatgtgggagaaaatcgttaaaatcaatggcccgtacaattttgatcgtgcgctcgaaagattaagcctcgacccgttgcatgcgctggatccgcttagacggacagtgaaaatcccgatatacggcaaacatccggaaacatcggctatcactgcaaccggcacgacggaggcacctgcatttctcatcaaaggcgaaaatccggataccgctgaaatcgttgagaagcggatttttcacctttttcagtgggagaaagacctcgcaggcatcacaaaccattttaccggcaccgcccttgaaccgctttttaaagaacaccgcggtacaccgtttgtgctcgacttttcgccatatgcctgcctggtcaaatgcatcatccaccaacagctcaatatgaaatttgcccatacgctgacagagcgtttcgtgtaccattttggttttcaaagagacggtgtctggttttatccgtttcctgaaaaaacggctgcattgcaagtcgcagatttacgcgccctgcagtttagcgagcggaaagcagagtatgtaatcgggctttccaaattggtggcatcaggcgaactggatctggcggcacttgagaaggaaccggatgaggaaattttaaaaacgctcgtgaaaatccgcggcatcggcccgtggaccgtgcaaaattttctcatgttcgggctcggccgcctgaatcattttccaaaagctgacatcggcatacagaaggcattgaaaaaacttttccagcttgagaaaaaacctacttatgaagaaatggacgcttacgcaaaagactgggagccttatttgagttatgcctccttgtacttatggcgcagcatcgaatagaaggacggattttatgcaaaaagaagccatcattaaaccaaaacagcaatttcccttgacgatcaaacggctcggcatcaacggggaaggggtcggctattttaagcggacggtcgttttcgtgccaggtgcactgccgggcgaagaggtggtcgttgaagcaaaacggatacacccgaaatacgtggagggcattgccaaaaaggtgcgaaaacgctcgccccaccgggtaaaacccccgtgcccggtttacgagcagtgcggcggctgccagctccagcaccttgcgtacaagcagcagcttatcgaaaaacgcgacattgtcatccaggcgcttgaacgccatacaaagttaaaagtagacgaactcgatatccgcccgacgattggcatggataacccgtggatttaccggaacaaaagccagttccagctcggcgaagaccatgggaaaattatttccggcctctacagcctcgattcccaccggctgatcaacgtgccggaatgcattgtccagcatccgctgacaaacaaagtgacacaagtggtgacacaaattttaaatgattttcatgtcccggtgtataatgaaaaaaccgggaaaggcatcgtgcggacaattgtcacaagggtaggcacccagaccggccaggcccaggttgtgctgattacggccaggcgggagctgccgcgcaaagatttcatcctttctgagatcaaaaagcgcctgccggaagtcgtatcggttgcgcaaaatgtgaacgccaaaaaaacgtcggttattttcggcgacgaaacgattcatttatccggaaaagaaattattgaagaacggctcgaagaattcacatacgaactctccgcccgcgcctttttccagctgaacccgatccagacggtgaagctttacaatgaagtgaaaaacgccgctgcgttgaccggcaaggagaaaattgcggatgcttactgcggtgtcggcaccattggcttgtggctcgcggacggcgcatctgaaatccgtggcatggatgtgattccggaagcgattgaagatgccagaaaaaacgccgccgcccacaacatcccgaacgcccattactttgccggcaaagcggaagtcctcctgccgaaatggctggacgaaggatggcgcccggacgttgtcattgtcgacccgccgcgttcgggctgtgacgaagccctcttacgtacaattttaaaggtgaagccgaagaagtttatatatgtttcatgcaacccttccactttggcgaaggacttgcacatattgagcaaggcttatgacgtagcgtacatgcagcctgtggatatgttcccgcaaacggcgcatgtggagtgtgtggcgaatctggagctgaaattgtgaccgccaattaaacatttacgacacatcataaacttttagccaacaggccctgttttcgggatcacgaagattcccgagttcagggcttttttctgtccagccgctatcattcctgcattatctcgatggttttttctccgtttccccctcctattttttacttagtttttatcttgacaaacaaaataatccggtatatcatttagtttttcaaaggaaataaaaactaaacaaataattttggaggttttaaaatgaaaaaagatgaaattctggataaattattggaaattacgcaccagccatttctcatctttgtaaatgcagtagaagaaaaaacagataatgcttttgaaacgctgaagctgttggcagcggaagaaaatgtgacagcgggccgcatttctgaagtgcttgatattaaaccgtcaagtgtaacgcaaattatcaagaaacttgaagaagccggcactgcccagcgtgaaaaatccgaacaagattcccgtgtaacgattgtaaaaatgacggataaaggccgtgaaagcttaaaagagcgcagttcaatttcaactacactaaaagatgtcctcttccaggggtttgcagaggatgagcttgaaatgttggatcaatatcttgaacgcatggtttccaatatttcaagcgaagcatttcataataagctccacgaagtcttcagcaatgataaacgctgggaactttttgggaaaatgagtgcccgtttcggccgtgcacgggaacaaatgctagagcgcagcgggtttggcggcttcggcggccgcggattcatgggcggcggattcgatggctggaagaaaggacgtaaaagataatggaaagtggattcaatggttcagtccgtaaagatcaaaccaaattttcaattggacaatttatgaaactcatcaaaacgacgcaaccgaaatatcttttgctggcgatgggtgtcttactgctggttgtttcatccggtgtacaaatttatgtgccgaaattagcatcatcccttgtcaatcatttttcaaaaggcattgactatgggttgttagggaaagtcttcgcactatttgtcatctcagccattgtttctgcaattggcggaacggttctggggatttttggagaaaatgtaatccaaaacttacggaaaagcttgtggcagaagttaaccaccttgaaagtgagctacttcgatactgttaaagctggtgaaatttcaagccgtctggtaaacgatactgcacaagtcaaacagttgctggctgtgactttcccgcagacactcgcgagcatcattactgtcatcgggacagtttatatgatgttcaagatggattggcacatgacggtcgctatggttgtagctgttccaatcgtcgtcatcttgatgatgccgatcatggcctttggtacaaaaatcgggcatatccgccaagaggcgatggcccaatttaacgggatttcaagtgaaacattaagtgaaatccggttggtaaaaacttcgaacgcagaaaaacaagcgcaagttcgtgccaataatgaaataaacaaactgtttaaagttggaaaaaaagaagctgtctttgatgcaacaatgcaacccatcatgatgatggtatttatgagtatggtctttgggcttcttgcttatgggatgcaccgtattgcaattggtgaaatgcaaatcgggattttaatgagctttctgatgtatttgtttaacttgattggggccgtgccggtcattgcaaccttattttcagaaatggcaaaggctgcgggttcaacgcgccgtgtacaagaattgcttgctgaaaagccagaagattttacgaag

(The sequence listing continues in the following parts.)
